(19) United States
(12) Patent Application Publication
(10) Pub. No.: US 2008/0113344 A1
(43) Pub. Date: May 15, 2008

(54) Methods and Compositions for the Response Prediction of Malignant Neoplasia to Treatment

(76) Inventors: Ralph Wirtz, Koln (DE); Marc Munnes, Erkrath (DE)

Correspondence Address: CHOATE, HALL & STEWART LLP, TWO INTERNATIONAL PLACE, BOSTON, MA, 02110, US

(21) Appl. No.: 10/576,900

(22) PCT Filed: Oct. 15, 2004
(86) PCT No.: PCT/EP04/11599

§ 371 Date: Apr. 30, 2007

(30) Foreign Application Priority Data
Oct. 28, 2003 (EP) 03024565.8

(51) Int. Cl. C12Q 1/68

(52) U.S. Cl. 435/6

(57) ABSTRACT

The invention provides novel compositions, methods and uses, for the prediction, diagnosis, prognosis, prevention and treatment of malignant neoplasia and breast cancer in particular. Genes that are differentially expressed in breast tissue of breast cancer patients versus those of normal people are disclosed.

### TECHNICAL FIELD OF THE INVENTION

[0001] The invention relates to methods and compositions for the prediction, diagnosis, prognosis, prevention and treatment of neoplastic disease. Of particular interest is the response prediction of neoplastic lesions to various therapeutic regimens. Neoplastic disease is often caused by chromosomal rearrangements which lead to over- or underexpression of the rearranged genes. The invention discloses genes which are overexpressed in neoplastic tissue and are useful as diagnostic markers and targets for treatment. Methods are disclosed for predicting, diagnosing and prognosing as well as preventing and treating neoplastic disease.

### BACKGROUND OF THE INVENTION

[0002] Chromosomal aberrations (amplifications, deletions, inversions, insertions, translocations and/or viral integrations) are of importance for the development of cancer and neoplastic lesions, as they account for deregulations of the respective regions. Amplifications of genomic regions have been described, in which genes of importance for growth characteristics, differentiation, invasiveness or resistance to therapeutic intervention are located. One of those regions with chromosomal aberrations is the region carrying the HER-2/neu gene which is amplified in breast cancer patients. In approximately 25% of breast cancer patients the HER-2/neu gene is overexpressed due to gene amplification. HER-2/neu overexpression correlates with a poor prognosis (relapse, overall survival, sensitivity to therapeutics). The importance of HER-2/neu for the prognosis of the disease progression has been described [Gusterson et al., 1992, (1)]. Gene specific antibodies raised against HER-2/neu (Herceptin™) have been generated to treat the respective cancer patients. However, only about 50% of the patients benefit from the antibody treatment with Herceptin™, which is most often combined with chemotherapeutic regimen. The discrepancy of HER-2/neu positive tumors (overexpressing HER-2/neu to similar extent) with regard to responsiveness to therapeutic intervention suggest, that there might be additional factors or genes being involved in growth and apoptotic characteristics of the respective tumor tissues. There seems to be no monocausal relationship between overexpression of the growth factor receptor HER-2/neu and therapy outcome. In line with this the measurement of commonly used tumor markers such as estrogen receptor, progesterone receptor, p53 and Ki-67 do provide only very limited information on clinical outcome of specific therapeutic decisions. Therefore there is a great need for a more detailed diagnostic and prognostic classification of tumors to enable improved therapy decisions and prediction of survival of the patients. The present invention addresses the need for additional markers by providing genes, which expression is deregulated in tumors and correlates with clinical outcome. One focus is the deregulation of genes present in specific chromosomal regions and their interaction in disease development and drug responsiveness.

[0003] HER-2/neu and other markers for neoplastic disease are commonly assayed with diagnostic methods such as immunohistochemistry (IHC) (e.g. HercepTest™ from DAKO Inc.) and Fluorescence-In-Situ-Hybridization (FISH) (e.g. quantitative measurement of the HER-2/neu and Topoisomerase II alpha with a fluorescence-in-situ-Hybridization kit from VYSIS). Additionally HER-2/neu can be assayed by detecting HER-2/neu fragments in serum with an ELISA test (BAYER Corp.) or a with a quantitative PCR kit which compares the amount of HER-2/neu gene with the amount of a non-amplified control gene in order to detect HER-2/neu gene amplifications (ROCHE). These methods, however, exhibit multiple disadvantages with regard to sensitivity, specificity, technical and personnel efforts, costs, time consumption, inter-lab reproducibility. These methods are also restricted with regard to measurement of multiple parameters within one patient sample (“multiplexing”). Usually only about 3 to 4 parameters (e.g. genes or gene products) can be detected per tissue slide. Therefore, there is a need to develop a fast and simple test to measure simultaneously multiple parameters in one sample. The present invention addresses the need for a fast and simple high-resolution method, that is able to detect multiple diagnostic and prognostic markers simultaneously.

### SUMMARY OF THE INVENTION

[0004] The present invention is based on discovery that chromosomal alterations in cancer tissues can lead to changes in the expression of genes that are encoded by the altered chromosomal regions. Exemplary 43 human genes have been identified that are co-amplified in neoplastic lesions from breast cancer tissue resulting in altered expression of several of these genes (Tables 1 to 4). These 43 genes are differentially expressed in breast cancer states, relative to their expression in normal, or non-breast cancer states. The present invention relates to derivatives, fragments, analogues and homologues of these genes and uses or methods of using of the same.

[0005] The present invention further relates to novel preventive, predictive, diagnostic, prognostic and therapeutic compositions and uses for malignant neoplasia and breast cancer in particular. Especially membrane bound marker gene products containing extracellular domains can be a particularly useful target for treatment methods as well as diagnostic and clinical monitoring methods.

[0006] It is a discovery of the present invention that several of these genes are characterized in that their gene products functionally interact in signaling cascades or by directly or indirectly influencing each other. This interaction is important for the normal physiology of certain non-neoplastic tissues (e.g. brain or neurogenic tissue). The deregulation of these genes in neoplastic lesions where they are normally exhibit of different level of activity or are not active, however, results in pathophysiology and affects the characteristics of the disease-associated tissue.

[0007] The present invention further relates to methods for detecting these deregulations in malignant neoplasia on DNA and mRNA level.

[0008] The present invention further relates to a method for the detection of chromosomal alterations characterized in that the relative abundance of individual mRNAs, encoded by genes, located in altered chromosomal regions is detected.

[0009] The present invention further relates to a method for the detection of the flanking breakpoints of named chromosomal alterations by measurement of DNA copy number by quantitative PCR or DNA-Arrays and DNA sequencing.

[0010] A method for the prediction, diagnosis or prognosis of malignant neoplasia by the detection of DNA sequences flanking named genomic breakpoint or are located within such.

[0011] The present invention further relates to a method for the detection of chromosomal alterations characterized in that the copy number of one or more genomic nucleic acid sequences located within an altered chromosomal region(s) is detected by quantitative PCR techniques (e.g. TaqMan™, Lightcycler™ and iCycler™).

[0012] The present invention further relates to a method for the prediction, diagnosis or prognosis of malignant neoplasia by the detection of at least 2 markers whereby the markers are genes and fragments thereof or genomic nucleic acid sequences that are located on one chromosomal region which is altered in malignant neoplasia and breast cancer in particular.

[0013] The present invention also discloses a method for the prediction, diagnosis or prognosis of malignant neoplasia by the detection of at least 2 markers whereby the markers are located on one or more chromosomal region(s) which is/are altered in malignant neoplasia; and the markers interact as (i) receptor and ligand or (ii) members of the same signal transduction pathway or (iii) members of synergistic signal transduction pathways or (iv) members of antagonistic signal transduction pathways or (v) transcription factor and transcription factor binding site.

[0014] Also disclosed is a method for the prediction, diagnosis or prognosis of malignant neoplasia by the detection of at least one marker whereby the marker is a VNTR, SNP, RFLP or STS which is located on one chromosomal region which is altered in malignant neoplasia due to amplification and the marker is detected in (a) a cancerous and (b) a non cancerous tissue or biological sample from the same individual. A preferred embodiment is the detection of at least one VNIR marker of Table 6 or at least on SNP marker of Table 4 or combinations thereof. Even more preferred can the detection, quantification and sizing of such polymorphic markers be achieved by methods of (a) for the comparative measurement of amount and size by PCR amplification and subsequent capillary electrophoresis, (b) for sequence determination and allelic discrimination by gel electrophoresis (e.g. SSCP, DGGE), real time kinetic PCR, direct DNA sequencing, pyro-sequencing, mass-specific allelic discrimination or resequencing by DNA array technologies, (c) for the determination of specific restriction patterns and subsequent electrophoretic separation and (d) for allelic discrimination by allel specific PCR (e.g. ASO). An even more favorable detection of a hetrozygous VNTR, SNP, RFLP or STS is done in a multiplex fashion, utilizing a variety of labeled primers (e.g. fluorescent, radioactive, bioactive) and a suitable capillary electrophoresis (CE) detection system.

[0015] In another embodiment the expression of these genes can be detected with DNA-arrays as described in WO9727317 and U.S. Pat. No. 6,379,895.

[0016] In a further embodiment the expression of these genes can be detected with bead based direct fluorescent readout techniques such as described in WO9714028 and WO9952708.

[0017] In one embodiment, the invention pertains to a method of determining the phenotype of a cell or tissue, comprising detecting the differential expression, relative to a normal or untreated cell, of at least one polynucleotide comprising SEQ ID NO: 2 to 6, 8, 9, 11 to 16, 18, 19 or 21 to 26 or 53 to 75, wherein the polynucleotide is differentially expressed by at least about 1.5 fold, at least about 2 fold or at least about 3 fold.

[0018] In a further aspect the invention pertains to a method of determining the phenotype of a cell or tissue, comprising detecting the differential expression, relative to a normal or untreated cell, of at least one polynucleotide which hybridizes under stringent conditions to one of the polynucleotides of SEQ ID NO: 2 to 6, 8, 9, 11 to 16, 18, 19 or 21 to 26 or 53 to 75 and encodes a polypeptide exhibiting the same biological function as given in Table 2 or 3 for the respective polynucleotide, wherein the polynucleotide is differentially expressed by at least at least about 1.5 fold, at least about 2 fold or at least about 3 fold.

[0019] In another embodiment of the invention a polynucleotide comprising a polynucleotide selected from SEQ ID NO: 2 to 6, 8, 9, 11 to 16, 18, 19 or 21 to 26 and 53 to 75 or encoding one of the polypeptides with SEQ ID NO: 28 to 32, 34, 35, 37 to 42, 44, 45 or 47 to 52 or 76 to 98 can be used to identify cells or tissue in individuals which exhibit a phenotype predisposed to breast cancer or a diseased phenotype, thereby (a) predicting whether an individual is at risk for the development, or (b) diagnosing whether an individual is having, or (c) prognosing the progression or the outcome of the treatment malignant neoplasia and breast cancer in particular.

[0020] In yet another embodiment the invention provides a method for identifying genomic regions which are altered on the chromosomal level and encode genes that are linked by function and are differentially expressed in malignant neoplasia and breast cancer in particular.

[0021] In yet another embodiment the invention provides the genomic regions 17q21, 3p21 and 12q13 for use in prediction, diagnosis and prognosis as well as prevention and treatment of malignant neoplasia and breast cancer. In particular not only the intragenic regions, but also intergenic regions, pseudogenes or non-transcribed genes of said chromosomal regions can be used for diagnostic, predictive, prognostic and preventive and therapeutic compositions and methods. Therefore sequences of coding or non-coding regions as depicted in this invention are offered by way of illustration and not by way of limitation. As one aspect of this, genomic sequences in between the genomic sequences depicted can be used for similar purposes.

[0022] In yet another embodiment the invention provides methods of screening for agents which regulate the activity of a polypeptide comprising a polypeptide selected from SEQ ID NO: 27 to 52 and 76 to 98 or encoded by a polynucleotide comprising a polynucleotide selected from SEQ ID NO: 1 to 26 and 53 to 75. A test compound is contacted with a polypeptide comprising a polypeptide selected from SEQ ID NO: 27 to 52 and 76 to 98 or encoded by a polynucleotide comprising a polynucleotide selected from SEQ ID NO: 1 to 26 and 53 to 75. Binding of the test compound to the polypeptide is detected. A test compound which binds to the polypeptide is thereby identified as a potential therapeutic agent for the treatment of malignant neoplasia and more particularly breast cancer.

[0023] In even another embodiment the invention provides another method of screening for agents which regulate the activity of a polypeptide comprising a polypeptide selected from SEQ ID NO: 27 to 52 and 76 to 98 or encoded by a polynucleotide comprising a polynucleotide selected from SEQ ID NO: 1 to 26 and 53 to 75. A test compound is contacted with a polypeptide comprising a polypeptide selected from SEQ ID NO: 27 to 52 and 76 to 98 or encoded by a polynucleotide comprising a polynucleotide selected from SEQ ID NO: 1 to 26 and 53 to 75. A biological activity mediated by the polypeptide is detected. A test compound which decreases the biological activity is thereby identified as a potential therapeutic agent for decreasing the activity of the polypeptide encoded by a polypeptide comprising a polypeptide selected from SEQ ID NO: 27 to 52 and 76 to 98 or encoded by a polynucleotide comprising a polynucleotide selected from SEQ ID NO: 1 to 26 and 53 to 75 in malignant neoplasia and breast cancer in particular. A test compound which increases the biological activity is thereby identified as a potential therapeutic agent for increasing the activity of the polypeptide encoded by a polypeptide selected from one of the polypeptides with SEQ ID NO: 27 to 52 and 76 to 98 or encoded by a polynucleotide comprising a polynucleotide selected from SEQ ID NO: 1 to 26 and 53 to 75 in malignant neoplasia and breast cancer in particular.

[0024] In another embodiment the invention provides a method of screening for agents which regulate the activity of a polynucleotide comprising a polynucleotide selected from SEQ ID NO: 1 to 26 and 53 to 75. A test compound is contacted with a polynucleotide comprising a polynucleotide selected from SEQ ID NO: 1 to 26 and 53 to 75. Binding of the test compound to the polynucleotide comprising a polynucleotide selected from SEQ ID NO: 1 to 26 and 53 to 75 is detected. A test compound which binds to the polynucleotide is thereby identified as a potential therapeutic agent for regulating the activity of a polynucleotide comprising a polynucleotide selected from SEQ ID NO: 1 to 26 and 53 to 75 in malignant neoplasia and breast cancer in particular.

[0025] The invention thus provides polypeptides selected from one of the polypeptides with SEQ ID NO: 27 to 52 and 76 to 98 or encoded by a polynucleotide comprising a polynucleotide selected from SEQ ID NO: 1 to 26 and 53 to 75 which can be used to identify compounds which may act, for example, as regulators or modulators such as agonists and antagonists, partial agonists, inverse agonists, activators, co-activators and inhibitors of the polypeptide comprising a polypeptide selected from SEQ ID NO: 27 to 52 and 76 to 98 or encoded by a polynucleotide comprising a polynucleotide selected from SEQ ID NO: 1 to 26 and 53 to 75. Accordingly, the invention provides reagents and methods for regulating a polypeptide comprising a polypeptide selected from SEQ ID NO: 27 to 52 and 76 to 98 or encoded by a polynucleotide comprising a polynucleotide selected from SEQ ID NO: 1 to 26 and 53 to 75 in malignant neoplasia and more particularly breast cancer. The regulation can be an up- or down regulation. Reagents that modulate the expression, stability or amount of a polynucleotide comprising a polynucleotide selected from SEQ ID NO: 1 to 26 and 53 to 75 or the activity of the polypeptide comprising a polypeptide selected from SEQ ID NO: 27 to 52 and 76 to 98 or encoded by a polynucleotide comprising a polynucleotide selected from SEQ ID NO: 1 to 26 and 53 to 75 can be a protein, a peptide, a peptidomimetic, a nucleic acid, a nucleic acid analogue (e.g. peptide nucleic acid, locked nucleic acid) or a small molecule. Methods that modulate the expression, stability or amount of a polynucleotide comprising a polynucleotide selected from SEQ ID NO: 1 to 26 and 53 to 75 or the activity of the polypeptide comprising a polypeptide selected from SEQ ID NO: 27 to 52 and 76 to 98 or encoded by a polynucleotide comprising a polynucleotide selected from SEQ ID NO: 1 to 26 and 53 to 75 can be gene replacement therapies, antisense, ribozyme and triplex nucleic acid approaches.

[0026] In one embodiment of the invention provides antibodies which specifically bind to a full-length or partial polypeptide comprising a polypeptide selected from SEQ ID NO: 27 to 52 and 76 to 98 or encoded by a polynucleotide comprising a polynucleotide selected from SEQ ID NO: 1 to 26 and 53 to 75 or a polynucleotide comprising a polynucleotide selected from SEQ ID NO: 1 to 26 and 53 to 75 for use in prediction, prevention, diagnosis, prognosis and treatment of malignant neoplasia and breast cancer in particular.

[0027] Yet another embodiment of the invention is the use of a reagent which specifically binds to a polynucleotide comprising a polynucleotide selected from SEQ ID NO: 1 to 26 and 53 to 75 or a polypeptide comprising a polypeptide selected from SEQ ID NO: 27 to 52 and 76 to 98 or encoded by a polynucleotide comprising a polynucleotide selected from SEQ ID NO: 1 to 26 and 53 to 75 in the preparation of a medicament for the treatment of malignant neoplasia and breast cancer in particular.

[0028] Still another embodiment is the use of a reagent that modulates the activity or stability of a polypeptide comprising a polypeptide selected from SEQ ID NO: 27 to 52 and 76 to 98 or encoded by a polynucleotide comprising a polynucleotide selected from SEQ ID NO: 1 to 26 and 53 to 75 or the expression, amount or stability of a polynucleotide comprising a polynucleotide selected from SEQ ID NO: 1 to 26 and 53 to 75 in the preparation of a medicament for the treatment of malignant neoplasia and breast cancer in particular.

[0029] Still another embodiment of the invention is a pharmaceutical composition which includes a reagent which specifically binds to a polynucleotide comprising a polynucleotide selected from SEQ ID NO: 1 to 26 and 53 to 75 or a polypeptide comprising a polypeptide selected from SEQ ID NO: 27 to 52 and 76 to 98 or encoded by a polynucleotide comprising a polynucleotide selected from SEQ ID NO: 1 to 26 and 53 to 75, and a pharmaceutically acceptable carrier.

[0030] Yet another embodiment of the invention is a pharmaceutical composition including a polynucleotide comprising a polynucleotide selected from SEQ ID NO: 1 to 26 and 53 to 75 or encoding a polypeptide comprising a polypeptide selected from SEQ ID NO: 27 to 52 and 76 to 98.

[0031] In one embodiment, a reagent which alters the level of expression in a cell of a polynucleotide comprising a polynucleotide selected from SEQ ID NO: 1 to 26 and 53 to 75 or encoding a polypeptide comprising a polypeptide selected from SEQ ID NO: 27 to 52 and 76 to 98, or a sequence complementary thereto, is identified by providing a cell, treating the cell with a test reagent, determining the level of expression in the cell of a polynucleotide comprising a polynucleotide selected from SEQ ID NO: 1 to 26 and 53 to 75 or encoding a polypeptide comprising a polypeptide selected from SEQ ID NO: 27 to 52 and 76 to 98 or a sequence complementary thereto, and comparing the level of expression of the polynucleotide in the treated cell with the level of expression of the polynucleotide in an untreated cell, wherein a change in the level of expression of the polynucleotide in the treated cell relative to the level of expression of the polynucleotide in the untreated cell is indicative of an agent which alters the level of expression of the polynucleotide in a cell.

[0032] The invention further provides a pharmaceutical composition comprising a reagent identified by this method.

[0033] Another embodiment of the invention is a pharmaceutical composition which includes a polypeptide comprising a polypeptide selected from SEQ ID NO: 27 to 52 and 76 to 98 or which is encoded by a polynucleotide comprising a polynucleotide selected from SEQ ID NO: 1 to 26 and 53 to 75.

[0034] A further embodiment of the invention is a pharmaceutical composition comprising a polynucleotide including a sequence which hybridizes under stringent conditions to a polynucleotide comprising a polynucleotide selected from SEQ ID NO: 1 to 26 and 53 to 75 and encoding a polypeptide exhibiting the same biological function as given for the respective polynucleotide in Table 2 or 3, or encoding a polypeptide comprising a polypeptide selected from SEQ ID NO: 27 to 52 and 76 to 98. Pharmaceutical compositions, useful in the present invention may further include fusion proteins comprising a polypeptide comprising a polynucleotide selected from SEQ ID NO: 27 to 52 and 76 to 98, or a fragment thereof, antibodies, or antibody fragments

### BRIEF DESCRIPTION OF THE DRAWINGS

[0035] FIG. 1 shows a sketch of the chromosome 17 with G-banding pattern and cytogenetic positions. In the blow out at the lower part of the figure a detailed view of the chromosomal area of the long arm of chromosome 17 (17q12-21.1) is provided. Each vertical rectangle depicted in medium gray, represents a gene as labeled below or above the individual position. The order of genes depicted in this graph has been deduced from experiments questioning the amplification an over expression and from public available data (e.g. UCSC, NCBI or Ensemble).

[0036] FIG. 2 shows the same region as depicted before in FIG. 1 and a cluster representation of the individual expression values measured by DNA-chip hybridization. The gene representing squares are indicated by a dotted line. In the upper part of the cluster representation 4 tumor cell lines, of which two harbor a known HER-2/neu over expression (SKBR3 and AU565), are depicted with their individual expression profiles. Not only the HER-2/neu gene shows a clear over expression but as provided by this invention several other genes with in the surrounding. In the middle part of the cluster representation expression data obtained from immune histochemically characterized tumor samples are presented. Two of the depicted probes show a significant over expression of genes marked by the white rectangles. For additional information and comparison expression profiles of several non diseased human tissues (mas obtained from Clontech Inc.) Are provided. Closest relation to the expression profile of HER-2/neu positive tumors displays human brain and neural tissue.

[0037] FIG. 3 provides data from DNA amplification measurements by qpcr (e.g. Taqman). Data indicates that in several analyzed breast cancer cell lines harbor amplification of genes which were located in the previously described region (ARCHEON). Data were displayed for each gene on the x-axis and 40-Ct at the y-axis. Data were normalized to the expression level of GAPDH as seen in the first group of columns.

[0038] FIG. 4 represents a graphical overview on the amplified regions and provides information on the length of the individual amplification and over expression in the analyzed tumor cell lines. The length of the amplification and the composition of genes has a significant impact on the nature of the cancer cell and on the responsiveness on certain drugs, as described elsewhere.

### DETAILED DESCRIPTION OF THE INVENTION

### Definitions

[0039] “Differential expression”, as used herein, refers to both quantitative as well as qualitative differences in the genes' expression patterns depending on differential development and/or tumor growth. Differentially expressed genes may represent “marker genes,” and/or “target genes”. The expression pattern of a differentially expressed gene disclosed herein may be utilized as part of a prognostic or diagnostic breast cancer evaluation. Alternatively, a differentially expressed gene disclosed herein may be used in methods for identifying reagents and compounds and uses of these reagents and compounds for the treatment of breast cancer as well as methods of treatment.

[0040] “Biological activity” or “bioactivity” or “activity” or “biological function”, which are used interchangeably, herein mean an effector or antigenic function that is directly or indirectly performed by a polypeptide (whether in its native or denatured conformation), or by any fragment thereof in vivo or in vitro. Biological activities include but are not limited to binding to polypeptides, binding to other proteins or molecules, enzymatic activity, signal transduction, activity as a DNA binding protein, as a transcription regulator, ability to bind damaged DNA, etc. A bioactivity can be modulated by directly affecting the subject polypeptide. Alternatively, a bioactivity can be altered by modulating the level of the polypeptide, such as by modulating expression of the corresponding gene.

[0041] The term “marker” or “biomarker” refers a biological molecule, e.g., a nucleic acid, peptide, hormone, etc., whose presence or concentration can be detected and correlated with a known condition, such as a disease state.

[0042] “Marker gene,” as used herein, refers to a differentially expressed gene which expression pattern may be utilized as part of predictive, prognostic or diagnostic malignant neoplasia or breast cancer evaluation, or which, alternatively, may be used in methods for identifying compounds useful for the treatment or prevention of malignant neoplasia and breast cancer in particular. A marker gene may also have the characteristics of a target gene.

[0043] “Target gene”, as used herein, refers to a differentially expressed gene involved in breast cancer in a manner by which modulation of the level of target gene expression or of target gene product activity may act to ameliorate symptoms of malignant neoplasia and breast cancer in particular. A target gene may also have the characteristics of a marker gene.

[0044] The term “biological sample”, as used herein, refers to a sample obtained from an organism or from components (e.g., cells) of an organism. The sample may be of any biological tissue or fluid. Frequently the sample will be a “clinical sample” which is a sample derived from a patient. Such samples include, but are not limited to, sputum, blood, blood cells (e.g., white cells), tissue or fine needle biopsy samples, cell-containing bodyfluids, free floating nucleic acids, urine, peritoneal fluid, and pleural fluid, or cells therefrom. Biological samples may also include sections of tissues such as frozen sections taken for histological purposes.

[0045] By “array” or “matrix” is meant an arrangement of addressable locations or “addresses” on a device. The locations can be arranged in two dimensional arrays, three dimensional arrays, or other matrix formats. The number of locations can range from several to at least hundreds of thousands. Most importantly, each location represents a totally independent reaction site. Arrays include but are not limited to nucleic acid arrays, protein arrays and antibody arrays. A “nucleic acid array” refers to an array containing nucleic acid probes, such as oligonucleotides, polynucleotides or larger portions of genes. The nucleic acid on the array is preferably single stranded. Arrays wherein the probes are oligonucleotides are referred to as “oligonucleotide arrays” or “oligonucleotide chips.” A “microarray,” herein also refers to a “biochip” or “biological chip”, an array of regions having a density of discrete regions of at least about 100/cm², and preferably at least about 1000/cm². The regions in a microarray have typical dimensions, e.g., diameters, in the range of between about 10-250 μm, and are separated from other regions in the array by about the same distance. A “protein array” refers to an array containing polypeptide probes or protein probes which can be in native form or denatured. An “antibody array” refers to an array containing antibodies which include but are not limited to monoclonal antibodies (e.g. from a mouse), chimeric antibodies, humanized antibodies or phage antibodies and single chain antibodies as well as fragments from antibodies.

[0046] The term “agonist”, as used herein, is meant to refer to an agent that mimics or upregulates (e.g., potentiates or supplements) the bioactivity of a protein. An agonist can be a wild-type protein or derivative thereof having at least one bioactivity of the wild-type protein. An agonist can also be a compound that upregulates expression of a gene or which increases at least one bioactivity of a protein. An agonist can also be a compound which increases the interaction of a polypeptide with another molecule, e.g., a target peptide or nucleic acid.

[0047] The term “antagonist” as used herein is meant to refer to an agent that downregulates (e.g., suppresses or inhibits) at least one bioactivity of a protein. An antagonist can be a compound which inhibits or decreases the interaction between a protein and another molecule, e.g., a target peptide, a ligand or an enzyme substrate. An antagonist can also be a compound that downregulates expression of a gene or which reduces the amount of expressed protein present.

[0048] “Small molecule” as used herein, is meant to refer to a composition, which has a molecular weight of less than about 5 kD and most preferably less than about 4 kD. Small molecules can be nucleic acids, peptides, polypeptides, peptidomimetics, carbohydrates, lipids or other organic (carbon-containing) or inorganic molecules. Many pharmaceutical companies have extensive libraries of chemical and/or biological mixtures, often fungal, bacterial, or algal extracts, which can be screened with any of the assays of the invention to identify compounds that modulate a bioactivity.

[0049] The terms “modulated” or “modulation” or “regulated” or “regulation” and “differentially regulated” as used herein refer to both upregulation (i.e., activation or stimulation (e.g., by agonizing or potentiating) and down regulation [i.e., inhibition or suppression (e.g., by antagonizing, decreasing or inhibiting)].

[0050] “Transcriptional regulatory unit” refers to DNA sequences, such as initiation signals, enhancers, and promoters, which induce or control transcription of protein coding sequences with which they are operably linked. In preferred embodiments, transcription of one of the genes is under the control of a promoter sequence (or other transcriptional regulatory sequence) which controls the expression of the recombinant gene in a cell-type in which expression is intended. It will also be understood that the recombinant gene can be under the control of transcriptional regulatory sequences which are the same or which are different from those sequences which control transcription of the naturally occurring forms of the polypeptide.

[0051] The term “derivative” refers to the chemical modification of a polypeptide sequence, or a polynucleotide sequence. Chemical modifications of a polynucleotide sequence can include, for example, replacement of hydrogen by an alkyl, acyl, or amino group. A derivative polynucleotide encodes a polypeptide which retains at least one biological or immunological function of the natural molecule. A derivative polypeptide is one modified by glycosylation, pegylation, or any similar process that retains at least one biological or immunological function of the polypeptide from which it was derived.

[0052] The term “nucleotide analog” refers to oligomers or polymers being at least in one feature different from naturally occurring nucleotides, oligonucleotides or polynucleotides, but exhibiting functional features of the respective naturally occurring nucleotides (e.g. base paring, hybridization, coding information) and that can be used for said compositions. The nucleotide analogs can consist of non-naturally occurring bases or polymer backbones, examples of which are LNAs, PNAs and Morpholinos. The nucleotide analog has at least one molecule different from its naturally occurring counterpart or equivalent.

[0053] “BREAST CANCER GENES” or “BREAST CANCER GENE” as used herein refers to the polynucleotides of SEQ ID NO: 1 to 26 and 53 to 75, as well as derivatives, fragments, analogs and homologues thereof, the polypeptides encoded thereby, the polypeptides of SEQ ID NO: 27 to 52 and 76 to 98 as well as derivatives, fragments, analogs and homologues thereof and the corresponding genomic transcription units which can be derived or identified with standard techniques well known in the art using the information disclosed in Tables 1 to 5 and FIGS. 1 to 4. The GenBank, Locuslink ID and the UniGene accession numbers of the polynucleotide sequences of the SEQ ID NO: 1 to 26 and 53 to 75 and the polypeptides of the SEQ ID NO: 27 to 52 and 76 to 98 are shown in Table 1, the gene description, gene function and subcellular localization is given in Tables 2 and 3.

[0054] The term “chromosomal region” as used herein refers to a consecutive DNA stretch on a chromosome which can be defined by cytogenetic or other genetic markers such as e.g. restriction length polymorphisms (RFLPs), single nucleotide polymorphisms (SNPs), expressed sequence tags (ESTs), sequence tagged sites (STSs), microsatellites, variable number of tandem repeats (VNTRs) and genes. Typically a chromosomal region consists of up to 2 Megabases (MB), up to 4 MB, up to 6 MB, up to 8 MB, up to 10 MB, up to 20 MB or even more MB.

[0055] The term “altered chromosomal region” or “abberant chromosomal region” refers to a structural change of the chromosomal composition and DNA sequence, which can occur by the following events: amplifications, deletions, inversions, insertions, translocations and/or viral integrations. A trisomy, where a given cell harbors more than two copies of a chromosome, is within the meaning of the term “amplification” of a chromosome or chromosomal region.

[0056] The present invention provides polynucleotide sequences and proteins encoded thereby, as well as probes derived from the polynucleotide sequences, antibodies directed to the encoded proteins, and predictive, preventive, diagnostic, prognostic and therapeutic uses for individuals which are at risk for or which have malignant neoplasia and breast cancer in particular. The sequences disclosure herein have been found to be differentially expressed in samples from breast cancer.

[0057] The present invention is based on the identification of 43 genes that are differentially regulated (up- or downregulated) in tumor biopsies of patients with clinical evidence of breast cancer. The identification of 43 human genes which were not known to be differentially regulated in breast cancer states and their significance for the disease is described in the working examples herein. The characterization of the co-expression of these genes provides newly identified roles in breast cancer. The gene names, the database accession numbers (GenBank and UniGene) as well as the putative or known functions of the encoded proteins and their subcellular localization are given in Tables 1 to 4. The primer sequences used for the gene amplification are shown in Table 5.

[0058] In either situation, detecting expression of these genes in excess or in with lower level as compared to normal expression provides the basis for the diagnosis of malignant neoplasia and breast cancer. Furthermore, in testing the efficacy of compounds during clinical trials, a decrease in the level of the expression of these genes corresponds to a return from a disease condition to a normal state, and thereby indicates a positive effect of the compound.

[0059] Another aspect of the present invention is based on the observation that neighboring genes within defined genomic regions functionally interact and influence each others function directly or indirectly. A genomic region encoding functionally interacting genes that are co-amplified and co-expressed in neoplastic lesions has been defined as an “ARCHEON”. (ARCHEON=Altered Region of Changed Chromosomal Expression Observed in Neoplasms). Chromosomal alterations often affect more than one gene. This is true for amplifications, duplications, insertions, integrations, inversions, translocations, and deletions. These changes can have influence on the expression level of single or multiple genes. Most commonly in the field of cancer diagnostics and treatment the changes of expression levels have been investigated for single, putative relevant target genes such as MLVI2 (5p14), NRASL3 (6p12), EGFR (7p12), c-myc (8q23), Cyclin D1 (11q13), IGF1R (15q25), HER-2/neu (17q21), PCNA (20q12). However, the altered expression level and interaction of multiple (i.e. more than two) genes within one genomic region with each other has not been addressed. Genes of an ARCHEON form gene clusters with tissue specific expression patterns. The mode of interaction of individual genes within such a gene cluster suspected to represent an ARCHEON can be either protein-protein or protein-nucleic acid interaction, which may be illustrated but not limited by the following examples: ARCHEON gene interaction may be in the same signal transduction pathway, may be receptor to ligand binding, receptor kinase and SH2 or SH3 binding, transcription factor to promoter binding, nuclear hormone receptor to transcription factor binding, phospho group donation (e.g. kinases) and acceptance (e.g. phosphoprotein), mRNA stabilizing protein binding and transcriptional processes. The individual activity and specificity of a pair genes and or the proteins encoded thereby or of a group of such in a higher order, may be readily deduced from literature, published or deposited within public databases by the skilled person. However in the context of an ARCHEON the interaction of members being part of an ARCHEON will potentiate, exaggerate or reduce their singular functions. This interaction is of importance in defined normal tissues in which they are normally co-expressed. Therefore, these clusters have been commonly conserved during evolution. The aberrant expression of members of these ARCHEON in neoplastic lesions, however, (especially within tissues in which they are normally not expressed) has influence on tumor characteristics such as growth, invasiveness and drug responsiveness. Due to the interaction of these neighboring genes it is of importance to determine the members of the ARCHEON which are involved in the deregulation events. In this regard amplification and deletion events in neoplastic lesions are of special interest.

[0060] The invention relates to a method for the detection of chromosomal alterations by (a) determining the relative mRNA abundance of individual mRNA species or (b) determining the copy number of one or more chromosomal region(s) by quantitative PCR. In one embodiment information on the genomic organization and spatial regulation of chromosomal regions is assessed by bioinformatic analysis of the sequence information of the human genome (UCSC, NCBI) and then combined with RNA expression data from GeneChip™ DNA-Arrays (Affymetrix) and/or quantitative PCR (TaqMan) from RNA-samples or genomic DNA.

[0061] In a further embodiment the functional relationship of genes located on a chromosomal region which is altered (amplified or deleted) is established. The altered chromosomal region is defined as an ARCHEON if genes located on that region functionally interact.

[0062] The 17q21 locus was investigated as one model system, harboring the HER-2/neu gene. By establishing a high-resolution assay to detect amplification events in neighboring genes, 43 genes that are commonly co-amplified in breast cancer cell lines and patient samples were identified. By gene array technologies and immunological methods their co-overexpression in tumor samples was demonstrated. Surprisingly, by clustering tissue samples with HER-2/neu positive Tumor samples, it was found that the expression pattern of this larger genomic region (consisting of 43 genes) is very similar to control brain tissue. HER-2/neu negative breast tumor tissue did not show a similar expression pattern. Indeed, some of the genes within these cluster are important for neural development (HER-2/neu, THRA) in mouse model systems or are described to be expressed in neural cells (NeuroD2). Moreover, by searching similar gene combinations in the human and rodent genome additional homologous chromosomal regions on chromosome 3p21 and 12q13 harboring several isoforms of the respective genes (see below) were found. There was a strong evidence for multiple interactions between the 43 candidate genes, as being part of identical pathways (HER-2, neu, GRB7, CrkRS, CDC6), influencing the expression of each other (HER-2/neu, THRA, RARA), interacting with each other (PPARGBP, THRA, RARA, NR1D1 or HER-2/neu, GRB7) or expressed in defined tissues (CACNB1, PPARGBP, etc.). Interestingly, the genomic regions of the ARCHEONs that were identified are amplified in acquired Tamoxifen resistance of HER-2/neu negative cells (MCF7), which are normally sensitive to Tamoxifen treatment [Achuthan et al., 2001, (2)].

[0063] Moreover, altered responsiveness to treatment due to the alterations of the genes within these ARCHEONs was observed. Surprisingly, genes within the ARCHEONs are of importance even in the absence of HER-2/neu homologues. Some of the genes within the ARCHEONs, do not only serve as marker genes for prognostic purposes, but have already been known as targets for therapeutic intervention. For example TOP2 alpha is a target of anthracyclins. THRA and RARA can be targeted by hormones and hormone analogs (e.g. T3, rT3, RA). Due to their high affinity binding sites and available screening assays (reporter assays based on their transcriptional potential) the hormone receptors which are shown to be linked to neoplastic pathophysiology for the first time herein are ideal targets for drug screening and treatment of malignant neoplasia and breast cancer in particular. In this regard it is essential to know which members of the ARCHEON are altered in the neoplastic lesions. Particularly it is important to know the nature, number and extent to which the ARCHEON genes are amplified or deleted. The ARCHEONs are flanked by similar, endogenous retroviruses (e.g. HERV-K=“human endogenous retrovirus”), some of which are activated in breast cancer. These viruses may have also been involved in the evolutionary duplication of the ARCHEONs.

[0064] The analysis of the 17q21 region proved data obtained by EC and identified several additional genes being co-amplified with the HER-2/neu gene. Comparative Analysis of RNA-based quantitative RT-PCR (TaqMan) with DNA-based qPCR from tumor cell lines identified the same amplified region. Genes at the 17q11.2-21. region are offered by way of illustration not by way of limitation. A graphical display of the described chromosomal region is provided in FIG. 1.

### Biological Relevance of the Genes which are Part of the 17q21 ARCHEON

### MLN50

[0065] By differential screening of cDNAs from breast cancer-derived metastatic axillary lymph nodes, TRAF4 and 3 other novel genes (MLN51, MLN62, MLN64) were identified that are overexpressed in breast cancer [Tomasetto et al., 1995, (3)]. One gene, which they designated MLN50, was mapped to 17q11-q21.3 by radioactive in situ hybridization. In breast cancer cell lines, overexpression of the 4 kb MLN50 mRNA was correlated with amplification of the gene and with amplification and overexpression of ERBB2, which maps to the same region. The authors suggested that the 2 genes belong to the same amplicon. Amplification of chromosomal region 17q11-q21 is one of the most common events occurring in human breast cancers. They reported that the predicted 261-amino acid MLN50 protein contains an N-terminal LIM domain and a C-terminal SH3 domain. They renamed the protein LASP1, for ‘LIM and SH3 protein.’ Northern blot analysis revealed that LASP1 mRNA was expressed at a basal level in all normal tissues examined and overexpressed in 8% of primary breast cancers. In most of these cancers, LASP1 and ERBB2 were simultaneously overexpressed.

### MLLT6

[0066] The MLLT6 (AF17) gene encodes a protein of 1,093 amino acids, containing a leucine-zipper dimerization motif located 3-prime of the fusion point and a cysteine-rich domain at the end terminus. AF17 was found to contain stretches of amino acids previously associated with domains involved in transcriptional repression or activation.

[0067] Chromosome translocations involving band 11q23 are associated with approximately 10% of patients with acute lymphoblastic leukemia (ALL) and more than 5% of patients with acute myeloid leukemia (AML). The gene at 11q23 involved in the translocations is variously designated ALL1, HRX, MLL, and TRX1. The partner gene in one of the rarer translocations, t(11;17)(q23;q21), designated MLLT6 on 17q12.

### ZNF144 (Mel18)

[0068] Mel18 cDNA encodes a novel cys-rich zinc finger motif. The gene is expressed strongly in most tumor cell lines, but its normal tissue expression was limited to cells of neural origin and was especially abundant in fetal neural cells. It belongs to a RING-finger motif family which includes BMI1. The MEL18/BMI1 gene family represents a mammalian homolog of the Drosophila ‘polycomb’ gene group, thereby belonging to a memory mechanism involved in maintaining the expression pattern of key regulatory factors such as Hox genes. Bmi1, Mel18 and M33 genes, as representative examples of mouse Pc-G genes. Common phenotypes observed in knockout mice mutant for each of these genes indicate an important role for Pc-G genes not only in regulation of Hox gene expression and axial skeleton development but also in control of proliferation and survival of haematopoietic cell lineages. This is in line with the observed proliferative deregulation observed in lymphoblastic leukemia. The MEL18 gene is conserved among vertebrates. Its mRNA is expressed at high levels in placenta, lung, and kidney, and at lower levels in liver, pancreas, and skeletal muscle. Interestingly, cervical and lumbo-sacral-HOX gene expression is altered in several primary breast cancers with respect to normal breast tissue with the HoxB gene cluster being present on 17q distal to the 17q21 locus. Moreover, delay of differentiation with persistent nests of proliferating cells was found in endothelial cells cocultured with HOXB7-transduced SkBr3 cells, which exhibit a 17q21 amplification. Tumorigenicity of these cells has been evaluated in vivo. Xenograft in athymic nude mice showed that SkBr3/HOXB7 cells developed tumors with an increased number of blood vessels, either irradiated or not, whereas parental SkBr3 cells did not show any tumor take unless mice were sublethally irradiated. As part of this invention, we have found MEL18 to be overexpressed specifically in tumors bearing Her-2/neu gene amplification, which can be critical for Hox expression.

[0069] Phosphatidylinositol-4-Phosphate 5-Kinase, Type II, Beta: PIP5K2B

[0070] Phosphoinositide kinases play central roles in signal transduction. Phosphatidylinositol-4-phosphate 5-kinases (PIP5Ks) phosphorylate phosphatidylinositol 4-phosphate, giving rise to phosphatidylinositol 4,5-bisphosphate. The PIP5K enzymes exist as multiple isoforms that have various immunoreactivities, kinetic properties, and molecular masses. They are unique in that they possess almost no homology to the kinase motifs present in other phosphatidylinositol, protein, and lipid kinases. By screening a human fetal brain cDNA library with the PIP5K2B EST the full length gene could be isolated. The deduced 416-amino acid protein is 78% identical to PIP5K2A. Using SDS-PAGE, the authors estimated that bacterially expressed PIP5K2B has a molecular mass of 47 kD. Northern blot analysis detected a 6.3-kb PIP5K2B transcript which was abundantly expressed in several human tissues. PIP5K2B interacts specifically with the juxtamembrane region of the p55 TNF receptor (TNFR1) and PIP5K2B activity is increased in mammalian cells by treatment with TNF-alpha. A modeled complex with membrane-bound substrate and ATP shows how a phosphoinositide kinase can phosphorylate its substrate in situ at the membrane interface. The substrate-binding site is open on 1 side, consistent with dual specificity for phosphatidylinositol 3- and 5-phosphates. Although the amino acid sequence of PIP5K2A does not show homology to known kinases, recombinant PIP5K2A exhibited kinase activity. PIP5K2A contains a putative Src homology 3 (SH3) domain-binding sequence. Overexpression of mouse PIP5K1B in COS7 cells induced an increase in short actin fibers and a decrease in actin stress fibers.

### TEM7

[0071] Using serial analysis of gene expression (SAGE) a partial cDNAs corresponding to several tumor endothelial markers (TEMs) that displayed elevated expression during tumor angiogenesis could be identified. Among the genes identified was TEM7. Using database searches and 5-prime RACE the entire TEM7 coding region, which encodes a 500-amino acid type I transmembrane protein has been described. The extracellular region of TEM7 contains a plexin-like domain and has weak homology to the ECM protein nidogen. The function of these domains, which are usually found in secreted and extracellular matrix molecules, is unknown. Nidogen itself belongs to the entactin protein family and helps to determine pathways of migrating axons by switching from circumferential to longitudinal migration. Entactin is involved in cell migration, as it promotes trophoblast outgrowth through a mechanism mediated by the RGD recognition site, and plays an important role during invasion of the endometrial basement membrane at implantation. As entactin promotes thymocyte adhesion but affects thymocyte migration only marginally, it is suggested that entactin may plays a role in thymocyte localization during T cell development.

[0072] In situ hybridization analysis of human colorectal cancer demonstrated that TEM7 was expressed clearly in the endothelial cells of the tumor stroma but not in the endothelial cells of normal colonic tissue. Using in situ hybridization to assay expression in various normal adult mouse tissues, they observed that TEM7 was largely undetectable in mouse tissues or tumors, but was abundantly expressed in mouse brain.

### ZNFN1A3

[0073] By screening a B-cell cDNA library with a mouse Aiolos N-terminal cDNA probe, a cDNA encoding human Aiolos, or ZNFN1A3, was obtained. The deduced 509-amino acid protein, which is 86% identical to its mouse counterpart, has 4 DNA-binding zinc fingers in its N terminus and 2 zinc fingers that mediate protein dimerization in its C terminus. These domains are 100% and 96% homologous to the corresponding domains in the mouse protein, respectively. Northern blot analysis revealed strong expression of a major 11.0- and a minor 4.4-kb ZNFN1A3 transcript in peripheral blood leukocytes, spleen, and thymus, with lower expression in liver, small intestine, and lung.

[0074] Ikaros (ZNFN1A1), a hemopoietic zinc finger DNA-binding protein, is a central regulator of lymphoid differentiation and is implicated in leukemogenesis. The execution of normal function of Ikaros requires sequence-specific DNA binding, transactivation, and dimerization domains. Mice with a mutation in a related zinc finger protein, Aiolos, are prone to B-cell lymphoma. In chemically induced murine lymphomas allelic losses on markers surrounding the Znfn1a1 gene were detected in 27% of the tumors analyzed. Moreover specific Ikaros expression was in primary mouse hormone-producing anterior pituitary cells and substantial for Fibroblast growth factor receptor 4 (FGFR4) expression, which itself is implicated in a multitude of endocrine cell hormonal and proliferative properties with FGFR4 being differentially expressed in normal and neoplastic pituitary. Moreover Ikaros binds to chromatin remodelling complexes containing SWI/SNF proteins, which antagonize Polycomb function. Interestingly at the telomeric end of the disclosed ARCHEON the SWI/SNF complex member SMARCE1 (=SWI/SNF-related, matrix-associated, actin-dependent regulators of chromatin) is located and part of the described amplification. Due to the related binding specificities of Ikaros and Palindrom Binding Protein (PBP) it is suggestive, that ZNFN1A3 is able to regulate the Her-2/neu enhancer.

### PPP1R1B

[0075] Midbrain dopaminergic neurons play a critical role in multiple brain functions, and abnormal signaling through dopaminergic pathways has been implicated in several major neurologic and psychiatric disorders. One well-studied target for the actions of dopamine is DARPP32. In the densely dopamine- and glutamate-innervated rat caudate-putamen, DARPP32 is expressed in medium-sized spiny neurons that also express dopamine D1 receptors. The function of DARPP32 seems to be regulated by receptor stimulation. Both dopaminergic and glutamatergic (NMDA) receptor stimulation regulate the extent of DARPP32 phosphorylation, but in opposite directions.

[0076] The human DARPP32 was isolated from a striatal cDNA library. The 204-amino acid DARPP32 protein shares 88% and 85% sequence identity, respectively, with bovine and rat DARPP32 proteins. The DARPP32 sequence is particularly conserved through the N terminus, which represents the active portion of the protein. Northern blot analysis demonstrated that the 2.1-kb DARPP32 mRNA is more highly expressed in human caudate than in cortex. In situ hybridization to postmortem human brain showed a low level of DARPP32 expression in all neocortical layers, with the strongest hybridization in the superficial layers. CDK5 phosphorylated DARPP32 in vitro and in intact brain cells. Phospho-thr75 DARPP32 inhibits PKA in vitro by a competitive mechanism. Decreasing phospho-thr75 DARPP32 in striatal cells either by a CDK5-specific inhibitor or by using genetically altered mice resulted in increased dopamine-induced phosphorylation of PKA substrates and augmented peak voltage-gated calcium currents. Thus, DARPP32 is a bifunctional signal transduction molecule which, by distinct mechanisms, controls a serine/threonine kinase and a serine/threonine phosphatase.

[0077] DARPP32 and t-DARPP are overexpressed in gastric cancers. It's suggested that overexpression of these 2 proteins in gastric cancers may provide an important survival advantage to neoplastic cells. It could be demonstrated that Darpp32 is an obligate intermediate in progesterone-facilitated sexual receptivity in female rats and mice. The facilitative effect of progesterone on sexual receptivity in female rats was blocked by antisense oligonucleotides to Darpp32. Homozygous mice carrying a null mutation for the Darpp32 gene exhibited minimal levels of progesterone-facilitated sexual receptivity when compared to their wildtype littermates, and progesterone significantly increased hypothalamic cAMP levels and cAMP-dependent protein kinase activity.

### CACNB1

[0078] In 1991 a cDNA clone encoding a protein with high homology to the beta subunit of the rabbit skeletal muscle dihydropyridine-sensitive calcium channel from a rat brain cDNA library [Pragnell et al., 1991, (4)]. This rat brain beta-subunit cDNA hybridized to a 3.4-kb message that was expressed in high levels in the cerebral hemispheres and hippocampus and much lower levels in cerebellum. The open reading frame encodes 597 amino acids with a predicted mass of 65,679 Da which is 82% homologous with the skeletal muscle beta subunit. The corresponding human beta-subunit gene was localized to chromosome 17 by analysis of somatic cell hybrids. The authors suggested that the encoded brain beta subunit, which has a primary structure highly similar to its isoform in skeletal muscle, may have a comparable role as an integral regulatory component of a neuronal calcium channel.

### RPL19

[0079] The ribosome is the only organelle conserved between prokaryotes and eukaryotes. In eukaryotes, this organelle consists of a 60S large subunit and a 40S small subunit. The mammalian ribosome contains 4 species of RNA and approximately 80 different ribosomal proteins, most of which appear to be present in equimolar amounts. In mammalian cells, ribosomal proteins can account for up to 15% of the total cellular protein, and the expression of the different ribosomal protein genes, which can account for up to 7 to 9% of the total cellular mRNAs, is coordinately regulated to meet the cell's varying requirements for protein synthesis. The mammalian ribosomal protein genes are members of multigene families, most of which are composed of multiple processed pseudogenes and a single functional intron-containing gene. The presence of multiple pseudogenes hampered the isolation and study of the functional ribosomal protein genes. By study of somatic cell hybrids, it has been elucidated that DNA sequences complementary to 6 mammalian ribosomal protein cDNAs could be assigned to chromosomes 5, 8, and 17. Ten fragments mapped to 3 chromosomes [Nakamichi et al., 1986, (5)]. These are probably a mixture of functional (expressed) genes and pseudogenes. One that maps to 5q23-q33 rescues Chinese hamster emetine-resistance mutations in interspecies hybrids and is therefore the transcriptionally active RPS14 gene. In 1989 a PCR-based strategy for the detection of intron-containing genes in the presence of multiple pseudogenes was described. This technique was used to identify the intron-containing PCR products of 7 human ribosomal protein genes and to map their chromosomal locations by hybridization to human/rodent somatic cell hybrids [Feo et al., 1992, (6)]. All 7 ribosomal protein genes were found to be on different chromosomes: RPL19 on 17p12-q11; RPL30 on 8; RPL35A on 18; RPL36A on 14; RPS6 on 9pter-p13; RPS11 on 19cen-qter; and RPS17 on 11pter-p13. These are also different sites from the chromosomal location of previously mapped ribosomal protein genes S14 on chromosome 5, S4 on Xq and Yp, and RP117A on 9q3-q34. By fluorescence in situ hybridization the position of the RPL19 gene was mapped to 17q11 [Davies et al., 1989, (7)].

### PPARBP, PBP, CRSP1, CRSP200, TRIP2, TRAP220, RB18A, DRIP230

[0080] The thyroid hormone receptors (TRs) are hormone-dependent transcription factors that regulate expression of a variety of specific target genes. They must specifically interact with a number of proteins as they progress from their initial translation and nuclear translocation to heterodimerization with retinoid X receptors (RXRs), functional interactions with other transcription factors and the basic transcriptional apparatus, and eventually, degradation. To help elucidate the mechanisms that underlie the transcriptional effects and other potential functions of TRs, the yeast interaction trap, a version of the yeast 2-hybrid system, was used to identify proteins that specifically interact with the ligand-binding domain of rat TR-beta-1 (THRB) [Lee et al., 1995, (8)]. The authors isolated HeLa cell cDNAs encoding several different TR-interacting proteins (TRIPs), including TRIP2. TRIP2 interacted with rat Thrb only in the presence of thyroid hormone. It showed a ligand-independent interaction with RXR-alpha, but did not interact with the glucocorticoid receptor (NR3C1) under any condition. By immunoscreening a human B-lymphoma cell cDNA expression library with the anti-p53 monoclonal antibody PAb1801, PPARBP was identified, which was called RB18A for ‘recognized by PAb1801 monoclonal antibody’ [Drane et al., 1997, (9)]. The predicted 1,566-amino acid RB18A protein contains several potential nuclear localization signals, 13 potential N-glycosylation sites, and a high number of potential phosphorylation sites. Despite sharing common antigenic determinants with p53, RB18A does not show significant nucleotide or amino acid sequence similarity with p53. Whereas the calculated molecular mass of RB18A is 166 kD, the apparent mass of recombinant RB18A was 205 kD by SDS-PAGE analysis. The authors demonstrated that RB18A shares functional properties with p53, including DNA binding, p53 binding, and self-oligomerization. Furthermore, RB18A was able to activate the sequence-specific binding of p53 to DNA, which was induced through an unstable interaction between both proteins. Northern blot analysis of human tissues detected an 8.5-kb RB18A transcript in all tissues examined except kidney, with highest expression in heart. Moreover mouse Pparbp, which was called Pbp for ‘Ppar-binding protein,’ as a protein that interacts with the Ppar-gamma (PPARG) ligand-binding domain in a yeast 2-hybrid system was identified [Zhu et al., 1997, (10)]. The authors found that Pbp also binds to PPAR-alpha (PPARA), RAR-alpha (RARA), RXR, and TR-beta-1 in vitro. The binding of Pbp to these receptors increased in the presence of specific ligands. Deletion of the last 12 amino acids from the C terminus of PPAR-gamma resulted in the abolition of interaction between Pbp and PPAR-gamma. Pbp modestly increased the transcriptional activity of PPAR-gamma, and a truncated form of Pbp acted as a dominant-negative repressor, suggesting that Pbp is a genuine transcriptional co-activator for PPAR. The predicted 1,560-amino acid Pbp protein contains 2 LXXLL motifs, which are considered necessary and sufficient for the binding of several co-activators to nuclear receptors. Northern blot analysis detected Pbp expression in all mouse tissues examined, with higher levels in liver, kidney, lung, and testis. In situ hybridization showed that Pbp is expressed during mouse ontogeny, suggesting a possible role for Pbp in cellular proliferation and differentiation. In adult mouse, in situ hybridization detected Pbp expression in liver, bronchial epithelium in the lung, intestinal mucosa, kidney cortex, thymic cortex, splenic follicles, and seminiferous epithelium in testis. Lateron PPARBP was identified, which was called TRAP220, from an immunopurified TR-alpha (THRA)-TRAP complex [Yuan et al., 1998, (11)]. The authors cloned Jurkat cell cDNAs encoding TRAP220. The predicted 1,581-amino acid TRAP220 protein contains LXXLL domains, which are found in other nuclear receptor-interacting proteins. TRAP220 is nearly identical to RB18A, with these proteins differing primarily by an extended N terminus on TRAP220. In the absence of TR-alpha, TRAP220 appears to reside in a single complex with other TRAPs. TRAP220 showed a direct ligand-dependent interaction with TR-alpha, which was mediated through the C terminus of TR-alpha and, at least in part, the LXXLL domains of TRAP220. TRAP220 also interacted with other nuclear receptors, including vitamin D receptor, RARA, RXRA, PPARA, PPARG, and estrogen receptor-alpha (ESR1; 133430), in a ligand-dependent manner. TRAP220 moderately stimulated human TR-alpha-mediated transcription in transfected cells, whereas a fragment containing the LXXLL motifs acted as a dominant-negative inhibitor of nuclear receptor-mediated transcription both in transfected cells and in cell-free transcription systems. Further studies indicated that TRAP220 plays a major role in anchoring other TRAPs to TR-alpha during the function of the TR-alpha-TRAP complex and that TRAP220 may be a global co-activator for the nuclear receptor superfamily. PBP, a nuclear receptor co-activator, interacts with estrogen receptor-alpha (ESR1) in the absence of estrogen. This interaction was enhanced in the presence of estrogen, but was reduced in the presence of the anti-estrogen Tamoxifen. Transfection of PBP into cultured cells resulted in enhancement of estrogen-dependent transcription, indicating that PBP serves as a co-activator in estrogen receptor signaling. To examine whether overexpression of PBP plays a role in breast cancer because of its co-activator function in estrogen receptor signaling, the levels of PBP expression in breast tumors was determined [Zhu et al., 1999, (12)]. High levels of PBP expression were detected in approximately 50% of primary breast cancers and breast cancer cell lines by ribonuclease protection analysis, in situ hybridization, and immunoperoxidase staining. By using FISH, the authors mapped the PBP gene to 17q12, a region that is amplified in some breast cancers. They found PBP gene amplification in approximately 24% (6 of 25) of breast tumors and approximately 30% (2 of 6) of breast cancer cell lines, implying that PBP gene overexpression can occur independent of gene amplification. They determined that the PBP gene comprises 17 exons that together span more than 37 kb. Their findings, in particular PBP gene amplification, suggested that PBP, by its ability to function as an estrogen receptor-alpha co-activator, may play a role in mammary epithelial differentiation and in breast carcinogenesis.

### NEUROD2

[0081] Basic helix-loop-helix (bHLH) proteins are transcription factors involved in determining cell type during development. In 1995 a bHLH protein was described, termed NeuroD (for ‘neurogenic differentiation’), that functions during neurogenesis [Lee et al., 1995, (13)]. The human NEUROD gene maps to chromosome 2q32. The cloning and characterization of 2 additional NEUROD genes, NEUROD2 and NEUROD3 was described in 1996 [McCormick et al., 1996, (14)]. Sequences for the mouse and human homologues were presented. NEUROD2 shows a high degree of homology to the bHLH region of NEUROD, whereas NEUROD3 is more distantly related. The authors found that mouse neuroD2 was initially expressed at embryonic day 11, with persistent expression in the adult nervous system. Similar to neuroD, neuroD2 appears to mediate neuronal differentiation. The human NEUROD2 was mapped to 17q12 by fluorescence in situ hybridization and the mouse homologue to chromosome 11 [Tamimi et al., 1997, (15)].

### Telethonin

[0082] Telethonin is a sarcomeric protein of 19 kD found exclusively in striated and cardiac muscle It appears to be localized to the Z disc of adult skeletal muscle and cultured myocytes. Telethonin is a substrate of titin, which acts as a molecular ‘ruler’ for the assembly of the sarcomere by providing spatially defined binding sites for other sarcomeric proteins. After activation by phosphorylation and calcium/calmodulin binding, titin phosphorylates the C-terminal domain of telethonin in early differentiating myocytes. The telethonin gene has been mapped to 17q12, adjacent to the phenylethanolamine N-methyltransferase gene [Valle et al., 1997, (16)].

### PENT, PNMT

[0083] Phenylethanolamine N-methyltransferase catalyzes the synthesis of epinephrine from norepinephrine, the last step of catecholamine biosynthesis. The cDNA clone was first isolated in 1998 for bovine adrenal medulla PNMT using mixed oligodeoxyribonucleotide probes whose synthesis was based on the partial amino acid sequence of tryptic peptides from the bovine enzyme [Kaneda et al., 1988, (17)]. Using a bovine cDNA as a probe, the authors screened a human pheochromocytoma cDNA library and isolated a cDNA clone with an insert of about 1.0 kb, which contained a complete coding region of the enzyme. Northern blot analysis of human pheochromocytoma polyadenylated RNA using this cDNA insert as the probe demonstrated a single RNA species of about 1,000 nucleotides, suggesting that this clone is a full-length cDNA. The nucleotide sequence showed that human PNMT has 282 amino acid residues with a predicted molecular weight of 30,853, including the initial methionine. The amino acid sequence was 88% homologous to that of bovine enzyme. The PNMT gene was found to consist of 3 exons and 2 introns spanning about 2,100 basepairs. It was demonstrated that in transgenic mice the gene is expressed in adrenal medulla and retina. A hybrid gene consisting of 2 kb of the PNMT 5-prime-flanking region fused to the simian virus 40 early region also resulted in tumor antigen mRNA expression in adrenal glands and eyes; furthermore, immunocytochemistry showed that the tumor antigen was localized in nuclei of adrenal medullary cells and cells of the inner nuclear cell layer of the retina, both prominent sites of epinephrine synthesis. The results indicate that the enhancer(s) for appropriate expression of the gene in these cell types are in the 2-kb 5-prime-flanking region of the gene.

[0084] Kaneda et al., 1988 (17), assigned the human PNMT gene to chromosome 17 by Southern blot analysis of DNA from mouse-human somatic cell hybrids. In 1992 the localization was narrowed down to 17q21-q22 by linkage analysis using RFLPs related to the PNMT gene and several 17q DNA markers [Hoehe et al., 1992, (18)]. The findings are of interest in light of the description of a genetic locus associated with blood pressure regulation in the stroke-prone spontaneously hypertensive rat (SHR-SP) on rat chromosome 10 in a conserved linkage synteny group corresponding to human chromosome 17q22-q24. See essential hypertension.

### MGC9753

[0085] This gene maps on chromosome 17, at 17q12 according to RefSeq. It is expressed at very high level. It is defined by cDNA clones and produces, by alternative splicing, 7 different transcripts can be obtained (SEQ ID NO:60 to 66 and 83 to 89, Table 1), altogether encoding 7 different protein isoforms. Of specific interest is the putatively secreted isoform g, encoded by a mRNA of 2.55 kb. It's premessenger covers 16.94 kb on the genome. It has a very long 3′ UTR. The protein (226 aa, MW 24.6 kDa, pI 8.5) contains no Pfam motif. The MGC9753 gene produces, by alternative splicing, 7 types of transcripts, predicted to encode 7 distinct proteins. It contains 13 confirmed introns, 10 of which are alternative. Comparison to the genome sequence shows that 11 introns follow the consensual [gt-ag] rule, 1 is atypical with good support [tg_cg]. The six most abundant isoforms are designated by a) to i) and code for proteins as follows:
[0086] a) This mRNA is 3.03 kb long, its premessenger covers 16.95 kb on the genome. It has a very long 3′ UTR. The protein (190 aa, MW 21.5 kDa, pI 7.2) contains no Pfam motif. It is predicted to localise in the endoplasmic reticulum.
[0087] c) This mRNA is 1.17 kb long, its premessenger covers 16.93 kb on the genome. It may be incomplete at the N terminus. The protein (368 aa, MW 41.5 kDa, pI 7.3) contains no Pfam motif.
[0088] d) This mRNA is 3.17 kb long, its premessenger covers 16.94 kb on the genome. It has a very long 3′ UTR and 5′p UTR. The protein (190 aa, MW 21.5 kDa, pI 7.2) contains no Pfam motif. It is predicted to localise in the endoplasmic reticulum.
[0089] g) This mRNA is 2.55 kb long, its premessenger covers 16.94 kb on the genome. It has a very long 3′ UTR. The protein (226 aa, MW 24.6kDa, pI 8.5) contains no Pfam motif. It is predicted to be secreted.
[0090] h) This mRNA is 2.68 kb long, its premessenger covers 16.94 kb on the genome. It has a very long 3′ UTR. The protein (320 aa, MW 36.5 kDa, pI 6.8) contains no Pfam motif. It is predicted to localise in the endoplasmic reticulum.
[0091] i) This mRNA is 2.34 kb long, its premessenger covers 16.94 kb on the genome. It may be incomplete at the N terminus. It has a very long 3′ UTR. The protein (217 aa, MW 24.4 kDa, pI 5.9) contains no Pfam motif.

[0092] The MCG9753 gene may be homologue to the CAB2 gene located on chromosome 17q12. The CAB2, a human homologue of the yeast COS 16 required for the repair of DNA double-strand breaks was cloned. Autofluorescence analysis of cells transfected with its GFP fusion protein demonstrated that CAB2 translocates into vesicles, suggesting that overexpression of CAB2 may decrease intercellular Mn—

[0093] (2+) by accumulating it in the vesicles, in the same way as yeast.

### Her-2/neu, ERBB2, NGL, TKR1

[0094] The oncogene originally called NEU was derived from rat neuro/glioblastoma cell lines. It encodes a tumor antigen, p185, which is serologically related to EGFR, the epidermal growth factor receptor. EGFR maps to chromosome 7. In 1985 it was found, that the human homologue, which they designated NGL (to avoid confusion with neuraminidase, which is also symbolized NEU), maps to 17q12-q22 by in situ hybridization and to 17q21-qter in somatic cell hybrids [Yang-Feng et al., 1985, (19)]. Thus, the SRO is 17q21-q22. Moreover, in 1985 a potential cell surface receptor of the tyrosine kinase gene family was identified and characterized by cloning the gene [Coussens et al., 1985, (20)]. Its primary sequence is very similar to that of the human epidermal growth factor receptor. Because of the seemingly close relationship to the human EGF receptor, the authors called the gene HER2. By Southern blot analysis of somatic cell hybrid DNA and by in situ hybridization, the gene was assigned to 17q21-q22. This chromosomal location of the gene is coincident with the NEU oncogene, which suggests that the 2 genes may in fact be the same; indeed, sequencing indicates that they are identical. In 1988 a correlation between overexpression of NEU protein and the large-cell, comedo growth type of ductal carcinoma was found [van de Vijver et al., 1988, (21)]. The authors found no correlation, however, with lymph-node status or tumor recurrence. The role of HER2/NEU in breast and ovarian cancer was described in 1989, which together account for one-third of all cancers in women and approximately one-quarter of cancer-related deaths in females [Slamon et al., 1989, (22)].

[0095] An ERBB-related gene that is distinct from the ERBB gene, called ERBB1 was found in 1985. ERBB2 was not amplified in vulva carcinoma cells with EGFR amplification and did not react with EGF receptor mRNA. About 30-fold amplification of ERBB2 was observed in a human adenocarcinoma of the salivary gland. By chromosome sorting combined with velocity sedimentation and Southern hybridization, the ERBB2 gene was assigned to chromosome 17 [Fukushige et al., 1986, (23)]. By hybridization to sorted chromosomes and to metaphase spreads with a genomic probe, they mapped the ERBB2 locus to 17q21. This is the chromosome 17 breakpoint in acute promyelocytic leukemia (APL). Furthermore, they observed amplification and elevated expression of the ERBB2 gene in a gastric cancer cell line. Antibodies against a synthetic peptide corresponding to 14 amino acid residues at the COOH-terminus of a protein deduced from the ERBB2 nucleotide sequence were raised in 1986. With these antibodies, the ERBB2 gene product from adenocarcinoma cells was precipitated and demonstrated to be a 185-kD glycoprotein with tyrosine kinase activity. A cDNA probe for ERBB2 and by in situ hybridization to APL cells with a 15;17 chromosome translocation located the gene to the proximal side of the breakpoint [Kaneko et al., 1987, (24)]. The authors suggested that both the gene and the breakpoint are located in band 17q21.1 and, further, that the ERBB2 gene is involved in the development of leukemia. In 1987 experiments indicated that NEU and HER2 are both the same as ERBB2 [Di Fiore et al., 1987, (25)]. The authors demonstrated that overexpression alone can convert the gene for a normal growth factor receptor, namely, ERBB2, into an oncogene. The ERBB2 to 17q11-q21 by in situ hybridization [Popescu et al., 1989, (26)]. By in situ hybridization to chromosomes derived from fibroblasts carrying a constitutional translocation between 15 and 17, they showed that the ERBB2 gene was relocated to the derivative chromosome 15; the gene can thus be localized to 17q12-q21.32. By family linkage studies using multiple DNA markers in the 17q12-q21 region the ERBB2 gene was placed on the genetic map of the region.

[0096] Interleukin-6 is a cytokine that was initially recognized as a regulator of immune and inflammatory responses, but also regulates the growth of many tumor cells, including prostate cancer. Overexpression of ERBB2 and ERBB3 has been implicated in the neoplastic transformation of prostate cancer. Treatment of a prostate cancer cell line with IL6 induced tyrosine phosphorylation of ERBB2 and ERBB3, but not ERBB1/EGFR. The ERBB2 forms a complex with the gp130 subunit of the IL6 receptor in an IL6-dependent manner. This association was important because the inhibition of ERBB2 activity resulted in abrogation of IL6-induced MAPK activation. Thus, ERBB2 is a critical component of IL6 signaling through the MAP kinase pathway [Qiu et al., 1998, (27)]. These findings showed how a cytokine receptor can diversify its signaling pathways by engaging with a growth factor receptor kinase.

[0097] Overexpression of ERBB2 confers Taxol resistance in breast cancers. Overexpression of ERBB2 inhibits Taxol-induced apoptosis [Yu et al., 1998, (28)]. Taxol activates CDC2 kinase in MDA-MB-435 breast cancer cells, leading to cell cycle arrest at the G2/M phase and, subsequently, apoptosis. A chemical inhibitor of CDC2 and a dominant-negative mutant of CDC2 blocked Taxol-induced apoptosis in these cells. Overexpression of ERBB2 in MDA-MB435 cells by transfection transcriptionally upregulates CDKN1A which associates with CDC2, inhibits Taxol-mediated CDC2 activation, delays cell entrance to G2/M phase, and thereby inhibits Taxol-induced apoptosis. In CDKN1A antisense-transfected MDA-MB-435 cells or in p21−/− MEF cells, ERBB2 was unable to inhibit Taxol-induced apoptosis. Therefore, CDKN1A participates in the regulation of a G2/M checkpoint that contributes to resistance to Taxol-induced apoptosis in ERBB2-overexpressing breast cancer cells.

[0098] A secreted protein of approximately 68 kD was described, designated herstatin, as the product of an alternative ERBB2 transcript that retains intron 8 [Doherty et al., 1999, (29)]. This alternative transcript specifies 340 residues identical to subdomains I and II from the extracellular domain of p185ERBB2, followed by a unique C-terminal sequence of 79 amino acids encoded by intron 8. The recombinant product of the alternative transcript specifically bound to ERBB2-transfected cells and was chemically crosslinked to p185ERBB2, whereas the intron-encoded sequence alone also bound with high affinity to transfected cells and associated with p185 solubilized from cell extracts. The herstatin mRNA was expressed in normal human fetal kidney and liver, but was at reduced levels relative to p185ERBB2 mRNA in carcinoma cells that contained an amplified ERBB2 gene. Herstatin appears to be an inhibitor of p185ERBB2, because it disrupts dimers, reduces tyrosine phosphorylation of p185, and inhibits the anchorage-independent growth of transformed cells that overexpress ERBB2. The HER2 gene is amplified and HER2 is overexpressed in 25 to 30% of breast cancers, increasing the aggressiveness of the tumor. Finally, it was found that a recombinant monoclonal antibody against HER2 increased the clinical benefit of first-line chemotherapy in metastatic breast cancer that overexpresses HER2 [Slamon et al., 2001, (30)].

### GRB7

[0099] Growth factor receptor tyrosine kinases (GF-RTKs) are involved in activating the cell cycle. Several substrates of GF-RTKs contain Src-homology 2 (SH2) and SH3 domains. SH2 domain-containing proteins are a diverse group of molecules important in tyrosine kinase signaling. Using the CORT (cloning of receptor targets) method to screen a high expression mouse library, the gene for murine Grb7, which encodes a protein of 535 amino acids, was isolated [Margolis et al., 1992, (31)]. GRB7 is homologous to ras-GAP (ras-GTPase-activating protein). It contains an SH2 domain and is highly expressed in liver and kidney. This gene defines the GRB7 family, whose members include the mouse gene Grb10 and the human gene GRB14.

[0100] A putative GRB7 signal transduction molecule and a GRB7V novel splice variant from an invasive human esophageal carcinoma was isolated [Tanaka et al., 1998, (32)]. Although both GRB7 isoforms shared homology with the Mig-10 cell migration gene of Caenorhabditis elegans, the GRB7V isoform lacked 88 basepairs in the C terminus; the resultant frameshift led to substitution of an SH2 domain with a short hydrophobic sequence. The wildtype GRB7 protein, but not the GRB7V isoform, was rapidly tyrosyl phosphorylated in response to EGF stimulation in esophageal carcinoma cells. Analysis of human esophageal tumor tissues and regional lymph nodes with metastases revealed that GRB7V was expressed in 40% of GRB7-positive esophageal carcinomas. GRB7V expression was enhanced after metastatic spread to lymph nodes as compared to the original tumor tissues. Transfection of an antisense GRB7 RNA expression construct lowered endogenous GRB7 protein levels and suppressed the invasive phenotype exhibited by esophageal carcinoma cells. These findings suggested that GRB7 isoforms are involved in cell invasion and metastatic progression of human esophageal carcinomas. By sequence analysis, The GRB7 gene was mapped to chromosome 17q2122, near the topoisomerase-2 gene [Dong et al., 1997, (33)]. GRB-7 is amplified in concert with HER2 in several breast cancer cell lines and that GRB-7 is overexpressed in both cell lines and breast tumors. GRB-7, through its SH2 domain, binds tightly to HER2 such that a large fraction of the tyrosine phosphorylated HER2 in SKBR-3 cells is bound to GRB-7 [Stein et al., 1994, (34)].

### GCSF, CSF3

[0101] Granulocyte colony-stimulating factor (or colony stimulating factor-3) specifically stimulates the proliferation and differentiation of the progenitor cells for granulocytes. The partial amino acid sequence of purified GCSF protein was determined, and by using oligonucleotides as probes, several GCSF cDNA clones were isolated from a human squamous carcinoma cell line cDNA library [Nagata et al., 1986, (35)]. Cloning of human GCSF cDNA shows that a single gene codes for a 177- or 180-amino acid mature protein of molecular weight 19,600. The authors found that the GCSF gene has 4 introns and that 2 different polypeptides are synthesized from the same gene by differential splicing of mRNA. The 2 polypeptides differ by the presence or absence of 3 amino acids. Expression studies indicate that both have authentic GCSF activity. A stimulatory activity from a glioblastoma multiform cell line being biologically and biochemically indistinguishable from GCSF produced by a bladder cell line was found in 1987. By somatic cell hybridization and in situ chromosomal hybridization, the GCSF gene was mapped to 17q11 in the region of the breakpoint in the 15;17 translocation characteristic of acute promyelocytic leukemia [Le Beau et al., 1987, (36)]. Further studies indicated that the gene is proximal to the said breakpoint and that it remains on the rearranged chromosome 17. Southern blot analysis using both conventional and pulsed field gel electrophoresis showed no rearranged restriction fragments. By use of a full-length cDNA clone as a hybridization probe in human-mouse somatic cell hybrids and in flow-sorted human chromosomes, the gene for GCSF was mapped to 17q21-q22 lateron

### THRA, THRA1, ERBA, EAR7, ERBA2, ERBA3

[0102] Both human and mouse DNA have been demonstrated to have two distantly related classes of ERBA genes and that in the human genome multiple copies of one of the classes exist [Jansson et al., 1983, (37)]. A cDNA was isolated derived from rat brain messenger RNA on the basis of homology to the human thyroid receptor gene [Thompson et al., 1987, (38)]. Expression of this cDNA produced a high-affinity binding protein for thyroid hormones. Messenger RNA from this gene was expressed in tissue-specific fashion, with highest levels in the central nervous system and no expression in the liver. An increasing body of evidence indicated the presence of multiple thyroid hormone receptors. The authors suggested that there may be as many as 5 different but related loci. Many of the clinical and physiologic studies suggested the existence of multiple receptors. For example, patients had been identified with familial thyroid hormone resistance in which peripheral response to thyroid hormones is lost or diminished while neuronal functions are maintained. Thyroidologists recognize a form of cretinism in which the nervous system is severely affected and another form in which the peripheral functions of thyroid hormone are more dramatically affected.

[0103] The cDNA encoding a specific form of thyroid hormone receptor expressed in human liver, kidney, placenta, and brain was isolated [Nakai et al., 1988, (39)]. Identical clones were found in human placenta. The cDNA encodes a protein of 490 amino acids and molecular mass of 54,824. Designated thyroid hormone receptor type alpha-2 (THR2), this protein is represented by mRNAs of different size in liver and kidney, which may represent tissue-specific processing of the primary transcript.

[0104] The THRA gene contains 10 exons spanning 27 kb of DNA. The last 2 exons of the gene are alternatively spliced. A 5-kb THRA1 mRNA encodes a predicted 410-amino acid protein; a 2.7-kb THRA2 mRNA encodes a 490-amino acid protein. A third isoform, TR-alpha-3, is derived by alternative splicing. The proximal 39 amino acids of the TH-alpha-2 specific sequences are deleted in TR-alpha-3. A second gene, THRB on chromosome 3, encodes 2 isoforms of TR-beta by alternative splicing. In 1989 the structure and function of the EAR1 and EAR7 genes was elucidated, both located on 17q21 [Miyajima et al., 1989, (40)]. The authors determined that one of the exons in the EAR7 coding sequence overlaps an exon of EAR1, and that the 2 genes are transcribed from opposite DNA strands. In addition, the EAR7 mRNA generates 2 alternatively spliced isoforms, referred to as EAR71 and EAR72, of which the EAR71 protein is the human counterpart of the chicken c-erbA protein.

[0105] The thyroid hormone receptors, beta, alpha-1, and alpha-2 3 mRNAs are expressed in all tissues examined and the relative amounts of the three mRNAs were roughly parallel. None of the 3 mRNAs was abundant in liver, which is the major thyroid hormone-responsive organ. This led to the assumption that another thyroid hormone receptor may be present in liver. It was found that ERBA, which potentiates ERBB, has an amino acid sequence different from that of other known oncogene products and related to those of the carbonic anhydrases [Debuire et al., 1984, (41)]. ERBA potentiates ERBB by blocking differentiation of erythroblasts at an immature stage. Carbonic anhydrases participate in the transport of carbon dioxide in erythrocytes. In 1986 it was shown that the ERBA protein is a high-affinity receptor for thyroid hormone. The cDNA sequence indicates a relationship to steroid-hormone receptors, and binding studies indicate that it is a receptor for thyroid hormones. It is located in the nucleus, where it binds to DNA and activates transcription.

[0106] Maternal thyroid hormone is transferred to the fetus early in pregnancy and is postulated to regulate brain development. The ontogeny of TR isoforms and related splice variants in 9 first-trimester fetal brains by semi-quantitative RT-PCR analysis has been investigated. Expression of the TR-beta-1, TR-alpha-1, and TR-alpha-2 isoforms was detected from 8.1 weeks' gestation. An additional truncated species was detected with the TR-alpha-2 primer set, consistent with the TK-alpha-3 splice variant described in the rat. All TR-alpha-derived transcripts were coordinately expressed and increased approximately 8-fold between 8.1 and 13.9 weeks' gestation. A more complex ontogenic pattern was observed for TR-beta-1, suggestive of a nadir between 8.4 and 12.0 weeks' gestation. The authors concluded that these findings point to an important role for the TR-alpha-1 isoform in mediating maternal thyroid hormone action during first-trimester fetal brain development.

[0107] The identification of the several types of thyroid hormone receptor may explain the normal variation in thyroid hormone responsiveness of various organs and the selective tissue abnormalities found in the thyroid hormone resistance syndromes. Members of sibships, who were resistant to thyroid hormone action, had retarded growth, congenital deafness, and abnormal bones, but had normal intellect and sexual maturation, as well as augmented cardiovascular activity. In this family abnormal T3 nuclear receptors in blood cells and fibroblasts have been demonstrated. The availability of cDNAs encoding the various thyroid hormone receptors was considered useful in determining the underlying genetic defect in this family.

[0108] The ERBA oncogene has been assigned to chromosome 17. The ERBA locus remains on chromosome 17 in the t(15;17) translocation of acute promyelocytic leukemia (APL). The thymidine kinase locus is probably translocated to chromosome 15; study of leukemia with t(17;21) and apparently identical breakpoint showed that TK was on 21q+. By in situ hybridization of a cloned DNA probe of c-erb-A to meiotic pachytene spreads obtained from uncultured spermatocytes it has been concluded that ERBA is situated at 17q21.33-17q22, in the same region as the break that generated the t(15;17) seen in APL. Because most of the grains were seen in 17q22, they suggested that ERBA is probably in the proximal region of 17q22 or at the junction between 17q22 and 17q21.33. By in situ hybridization it has been demonstrated, that that ERBA remains at 17q11-q12 in APL, whereas TP53, at 17q21-q22, is translocated to chromosome 15. Thus, ERBA must be at 17q11.2 just proximal to the breakpoint in the APL translocation and just distal to it in the constitutional translocation.

[0109] The aberrant THRA expression in nonfunctioning pituitary tumors has been hypothesized to reflect mutations in the receptor coding and regulatory sequences. They screened THRA mRNA and THRB response elements and ligand-binding domains for sequence anomalies. Screening THRA mRNA from 23 tumors by RNAse mismatch and sequencing candidate fragments identified 1 silent and 3 missense mutations, 2 in the common THRA region and 1 that was specific for the alpha-2 isoform. No THRB response element differences were detected in 14 nonfunctioning tumors, and no THRB ligand-binding domain differences were detected in 23 nonfunctioning tumors. Therefore it has been suggested that the novel thyroid receptor mutations may be of functional significance in terms of thyroid receptor action, and further definition of their functional properties may provide insight into the role of thyroid receptors in growth control in pituitary cells.

### RAR-alpha

[0110] A cDNA encoding a protein that binds retinoic acid with high affinity has been cloned [Petkovich et al., 1987, (42)]. The protein was found to be homologous to the receptors for steroid hormones, thyroid hormones, and vitamin D3, and appeared to be a retinoic acid-inducible transacting enhancer factor. Thus, the molecular mechanisms of the effect of vitamin A on embryonic development, differentiation and tumor cell growth may be similar to those described for other members of this nuclear receptor family. In general, the DNA-binding domain is most highly conserved, both within and between the 2 groups of receptors (steroid and thyroid); Using a cDNA probe, the RAR-alpha gene has been mapped to 17q21 by in situ hybridization [Mattei et al., 1988, (43)]. Evidence has been presented for the existence of 2 retinoic acid receptors, RAR-alpha and RAR-beta, mapping to chromosome 17q21.1 and 3p24, respectively. The alpha and beta forms of RAR were found to be more homologous to the 2 closely related thyroid hormone receptors alpha and beta, located on 17q11.2 and 3p25-p21, respectively, than to any other members of the nuclear receptor family. These observations suggest that the thyroid hormone and retinoic acid receptors evolved by gene, and possibly chromosome, duplications from a common ancestor, which itself diverged rather early in evolution from the common ancestor of the steroid receptor group of the family. They noted that the counterparts of the human RARA and RARB genes are present in both the mouse and chicken. The involvement of RARA at the APL breakpoint may explain why the use of retinoic acid as a therapeutic differentiation agent in the treatment of acute myeloid leukemias is limited to APL. Almost all patients with APL have a chromosomal translocation t(15;17)(q22;q21). Molecular studies reveal that the translocation results in a chimeric gene through fusion between the PML gene on chromosome 15 and the RARA gene on chromosome 17. A hormone-dependent interaction of the nuclear receptors RARA and RXRA with CLOCK and MOP4 has been presented.

[0111] CDC18L, CDC6

[0112] In yeasts, Cdc6 (Saccharomyces cerevisiae) and Cdc18 (Schizosaccharomyces pombe) associate with the origin recognition complex (ORC) proteins to render cells competent for DNA replication. Thus, Cdc6 has a critical regulatory role in the initiation of DNA replication in yeast. cDNAs encoding Xenopus and human homologues of yeast CDC6 have been isolated [Williams et al., 1997, (44)]. They designated the human and Xenopus proteins p62(cdc6). Independently, in a yeast 2-hybrid assay using PCNA as bait, cDNAs encoding the human CDC6/Cdc18 homologue have been isolated [Saha et al, 1998, (45)]. These authors reported that the predicted 560-amino acid human protein shares approximately 33% sequence identity with the 2 yeast proteins. On Western blots of HeLa cell extracts, human CDC6/cdc18 migrates as a 66-kD protein. Although Northern blots indicated that CDC6/Cdc 18 mRNA levels peak at the onset of S phase and diminish at the onset of mitosis in HeLa cells, the authors found that total CDC6/Cdc 18 protein level is unchanged throughout the cell cycle. Immunofluorescent analysis of epitope-tagged protein revealed that human CDC6/Cdc18 is nuclear in G1- and cytoplasmic in S-phase cells, suggesting that DNA replication may be regulated by either the translocation of this protein between the nucleus and cytoplasm or by selective degradation of the protein in the nucleus. Immunoprecipitation studies showed that human CDC6/Cdc18 associates in vivo with cyclin A, CDK2, and ORC1. The association of cyclin-CDK2 with CDC6/Cdc18 was specifically inhibited by a factor present in mitotic cell extracts. Therefore it has been suggested that if the interaction between CDC6/Cdc 18 with the S phase-promoting factor cyclin-CDK2 is essential for the initiation of DNA replication, the mitotic inhibitor of this interaction could prevent a premature interaction until the appropriate time in G1. Cdc6 is expressed selectively in proliferating but not quiescent mammalian cells, both in culture and within tissues in intact animals [Yan et al., 1998, (46)]. During the transition from a growth-arrested to a proliferative state, transcription of mammalian Cdc6 is regulated by E2F proteins, as revealed by a functional analysis of the human Cdc6 promoter and by the ability of exogenously expressed E2F proteins to stimulate the endogenous Cdc6 gene. Immunodepletion of Cdc6 by microinjection of anti-Cdc6 antibody blocked initiation of DNA replication in a human tumor cell line. The authors concluded that expression of human Cdc6 is regulated in response to mitogenic signals through transcriptional control mechanisms involving E2F proteins, and that Cdc6 is required for initiation of DNA replication in mammalian cells.

[0113] Using a yeast 2-hybrid system, co-purification of recombinant proteins, and immunoprecipitation, it has been demonstrated lateron that an N-terminal segment of CDC6 binds specifically to PR48, a regulatory subunit of protein phosphatase 2A (PP2A). The authors hypothesized that dephosphorylation of CDC6 by PP2A, mediated by a specific interaction with PR48 or a related B-double prime protein, is a regulatory event controlling initiation of DNA replication in mammalian cells. By analysis of somatic cell hybrids and by fluorescence in situ hybridization the human p62(cdc6) gene has been to 17q21.3.

### TOP2A, TOP2, TOP2 alpha

[0114] DNA topoisomerases are enzymes that control and alter the topologic states of DNA in both prokaryotes and eukaryotes. Topoisomerase II from eukaryotic cells catalyzes the relaxation of supercoiled DNA molecules, catenation, decatenation, knotting, and unknotting of circular DNA. It appears likely that the reaction catalyzed by topoisomerase II involves the crossing-over of 2 DNA segments. It has been estimated that there are about 100,000 molecules of topoisomerase II per HeLa cell nucleus, constituting about 0.1% of the nuclear extract. Since several of the abnormal characteristics of ataxia-telangiectasia appear to be due to defects in DNA processing, screening for these enzyme activities in 5 AT cell lines has been performed [Singh et al., 1988, (47)]. In comparison to controls, the level of DNA topoisomerase II, determined by unknotting of P4 phage DNA, was reduced substantially in 4 of these cell lines and to a lesser extent in the fifth. DNA topoisomerase I, assayed by relaxation of supercoil DNA, was found to be present at normal levels.

[0115] The entire coding sequence of the human TOP2 gene has been determined [Tsai-Pflugfelder et al., 1988, (48)].

[0116] In addition human cDNAs that had been isolated by screening a cDNA library derived from a mechlorethamine-resistant Burkitt lymphoma cell line (Raji-HN2) with a Drosophila Topo II cDNA had been sequenced [Chung et al., 1989, (49)]. The authors identified 2 classes of sequence representing 2 TOP2 isoenzymes, which have been named TOP2A and TOP2B. The sequence of 1 of the TOP2A cDNAs is identical to that of an internal fragment of the TOP2 cDNA isolated by Tsai-Pflugfelder et al., 1988 (48). Southern blot analysis indicated that the TOP2A and TOP2B cDNAs are derived from distinct genes. Northern blot analysis using a TOP2A-specific probe detected a 6.5-kb transcript in the human cell line U937. Antibodies against a TOP2A peptide recognized a 170-kD protein in U937 cell lysates. Therefore it was concluded that their data provide genetic and immunochemical evidence for 2 TOP2 isozymes. The complete structures of the TOP2A and TOP2B genes has been reported [Lang et al., 1998, (50)]. The TOP2A gene spans approximately 30 kb and contains 35 exons.

[0117] Tsai-Pflugfelder et al., 1988 (48) showed that the human enzyme is encoded by a single-copy gene which they mapped to 17q21-22 by a combination of in situ hybridization of a cloned fragment to metaphase chromosomes and by Southern hybridization analysis with a panel of mouse-human hybrid cell lines. The assignment to chromosome 17 has been confirmed by the study of somatic cell hybrids. Because of co-amplification in an adenocarcinoma cell line, it was concluded that the TOP2A and ERBB2 genes may be closely linked on chromosome 17 [Keith et al., 1992, (51)]. Using probes that detected RFLPs at both the TOP2A and TOP2B loci, the demonstrated heterozygosity at a frequency of 0.17 and 0.37 for the alpha and beta loci, respectively. The mouse homologue was mapped to chromosome 11 [Kingsmore et al., 1993, (52)]. The structure and function of type II DNA topoisomerases has been reviewed [Watt et al., 1994, (53)]. DNA topoisomerase II-alpha is associated with the pol II holoenzyme and is a required component of chromatin-dependent co-activation. Specific inhibitors of topoisomerase II blocked transcription on chromatin templates, but did not affect transcription on naked templates. Addition of purified topoisomerase II-alpha reconstituted chromatin-dependent activation activity in reactions with core pol II. Therefore the transcription on chromatin templates seems to result in the accumulation of superhelical tension, making the relaxation activity of topoisomerase II essential for productive RNA synthesis on nucleosomal DNA.

### IGFBP4

[0118] Six structurally distinct insulin-like growth factor binding proteins have been isolated and their cDNAs cloned: IGFBP1, IGFBP2, IGFBP3, IGFBP4, IGFBP5 and IGFBP6. The proteins display strong sequence homologies, suggesting that they are encoded by a closely related family of genes. The IGFBPs contain 3 structurally distinct domains each comprising approximately one-third of the molecule. The N-terminal domain 1 and the C-tenminal domain 3 of the 6 human IGFBPs show moderate to high levels of sequence identity including 12 and 6 invariant cysteine residues in domains 1 and 3, respectively (IGFBP6 contains 10 cysteine residues in domain 1), and are thought to be the IGF binding domains. Domain 2 is defined primarily by a lack of sequence identity among the 6 IGFBPs and by a lack of cysteine residues, though it does contain 2 cysteines in IGFBP4. Domain 3 is homologous to the thyroglobulin type I repeat unit. Recombinant human insulin-like growth factor binding proteins 4, 5, and 6 have been characterized by their expression in yeast as fusion proteins with ubiquitin [Kiefer et al., 1992, (54)]. Results of the study suggested to the authors that the primary effect of the 3 proteins is the attenuation of IGF activity and suggested that they contribute to the control of IGF-mediated cell growth and metabolism. Moreover, IGFBPs have influence on EGFR and Her-2/neu mediated signaling. Addition of IGFBPs to Her-2/neu overexpressing cells at least in part blocks growth and survival characteristics of the respective cells.

[0119] Based on peptide sequences of a purified insulin-like growth factor-binding protein (IGFBP) rat IGFBP4 has been cloned by using PCR [Shimasaki et al., 1990, (55)]. They used the rat cDNA to clone the human ortholog from a liver cDNA library. Human IGFBP4 encodes a 258-amino acid polypeptide, which includes a 21-amino acid signal sequence. The protein is very hydrophilic, which may facilitate its ability as a carrier protein for the IGFs in blood. Northern blot analysis of rat tissues revealed expression in all tissues examined, with highest expression in liver. It was stated that IGFBP4 acts as an inhibitor of IGF-induced bone cell proliferation. The genomic region containing the IGFBP gene. The gene consists of 4 exons spanning approximately 15 kb of genomic DNA has been examined [Zazzi et al., 1998, (56)]. The upstream region of the gene contains a TATA box and a cAMP-responsive promoter.

[0120] By in situ hybridization, the IGFBP4 gene was mapped to 17q12-q21 [Bajalica et al., 1992, (57)]. Because the hereditary breast-ovarian cancer gene BRCA1 had been mapped to the same region, it has been investigated whether IGFBP4 is a candidate gene by linkage analysis of 22 BRCA1 families; the finding of genetic recombination suggested that it is not the BRCA1 gene [Tonin et al., 1993, (58)].

### EBI 1, CCR7, CMKBR7

[0121] Using PCR with degenerate oligonucleotides, a lymphoid-specific member of the G protein-coupled receptor family has been identified and mapped mapped to 17q12-q21.2 by analysis of human/mouse somatic cell hybrid DNAs and fluorescence in situ hybridization. It has been shown that this receptor had been independently identified as the Epstein-Barr-induced cDNA (symbol EBI1) [Birkenbach et al., 1993, (59)]. EBI1 is expressed in normal lymphoid tissues and in several B- and T-lymphocyte cell lines. While the function and the ligand for EBI1 remains unknown, its sequence and gene structure suggest that it is related to receptors that recognize chemoattractants, such as interleukin-8, RANTES, C5a, and fMet-Leu-Phe. Like the chemoattractant receptors, EBI1 contains intervening sequences near its 5-prime end; however, EBI1 is unique in that both of its introns interrupt the coding region of the first extracellular domain. Mouse Ebi1 cDNA has been isolated and found to encode a protein with 86% identity to the human homologue.

[0122] Subsets of murine CD4+ T cells localize to different areas of the spleen after adoptive transfer. Naive and T helper-1 (TH1) cells, which express CCR7, home to the periarteriolar lymphoid sheath, whereas activated TH2 cells, which lack CCR7, form rings at the periphery of the T-cell zones near B-cell follicles. It has been found that retroviral transduction of TH2 cells with CCR7 forced them to localize in a TH1-like pattern and inhibited their participation in B-cell help in vivo but not in vitro. Apparently differential expression of chemokine receptors results in unique cellular migration patterns that are important for effective immune responses.

[0123] CCR7 expression divides human memory T cells into 2 functionally distinct subsets. CCR7-memory cells express receptors for migration to inflamed tissues and display immediate effector function. In contrast, CCR7⁺ memory cells express lymph node homing receptors and lack immediate effector function, but efficiently stimulate dendritic cells and differentiate into CCR7⁻ effector cells upon secondary stimulation. The CCR7⁺ and CCR7⁻ T cells, named central memory (T-CM) and effector memory (T-EM), differentiate in a step-wise fashion from naive T cells, persist for years after immunization, and allow a division of labor in the memory response.

[0124] CCR7 expression in memory CD8⁺ T lymphocyte responses to HIV and to cytomegalovirus (CMV) tetramers has been evaluated. Most memory T lymphocytes express CD45RO, but a fraction express instead the CD45RA marker. Flow cytometric analyses of marker expression and cell division identified 4 subsets of HIV- and CMV-specific CD8⁺ T cells, representing a lineage differentiation pattern: CD45RA⁺CCR7⁺ (double-positive); CD45RA⁻CCR7⁺; CD45RA⁻CCR7⁻ (double-negative); CD45RA⁺CCR7⁻. The capacity for cell division, as measured by 5-(and 6-)carboxyl-fluorescein diacetate, succinimidyl ester, and intracellular staining for the Ki67 nuclear antigen, is largely confined to the CCR7⁺ subsets and occurred more rapidly in cells that are also CD45RA⁺. Although the double-negative cells did not divide or expand after stimulation, they did revert to positivity for either CD45RA or CCR7 or both. The CD45RA⁺CCR7⁻ cells, considered to be terminally differentiated, fail to divide, but do produce interferon-gamma and express high levels of perforin. The representation of subsets specific for CMV and for HIV is distinct. Approximately 70% of HIV-specific CD8⁺ memory T cells are double-negative or preterminally differentiated compared to 40% of CMV-specific cells. Approximately 50% of the CMV-specific CD8+ memory T cells are terminally differentiated compared to fewer than 10% of the HIV-specific cells. It has been proposed that terminally differentiated CMV-specific cells are poised to rapidly intervene, while double-positive precursor cells remain for expansion and replenishment of the effector cell pool. Furthermore, high-dose antigen tolerance and the depletion of HIV-specific CD4⁺ helper T-cell activity may keep the HIV-specific memory CD8⁺ T cells at the double-negative stage, unable to differentiate to the terminal effector state. B lymphocytes recirculate between B cell-rich compartments (follicles or B zones) in secondary lymphoid organs, surveying for antigen. After antigen binding, B cells move to the boundary of B and T zones to interact with T-helper cells. Furthermore it has been demonstrated that antigen-engaged B cells have increased expression of CCR7, the receptor for the T-zone chemokines CCL19 (also known as ELC) and CCL21, and that they exhibit increased responsiveness to both chemoattractants. In mice lacking lymphoid CCL19 and CCL21 chemokines, or with B cells that lack CCR7, antigen engagement fails to cause movement to the T zone. Using retroviral-mediated gene transfer, the authors demonstrated that increased expression of CCR7 is sufficient to direct B cells to the T zone. Reciprocally, overexpression of CXCR5, the receptor for the B-zone chemokine CXCL13, is sufficient to overcome antigen-induced B-cell movement to the T zone. This points toward a mechanism of B-cell relocalization in response to antigen, and established that cell position in vivo can be determined by the balance of responsiveness to chemoattractants made in separate but adjacent zones.

### BAF57, SMARCE 1

[0125] The SWI/SNF complex in S. cerevisiae and Drosophila is thought to facilitate transcriptional activation of specific genes by antagonizing chromatin-mediated transcriptional repression. The complex contains an ATP-dependent nucleosome disruption activity that can lead to enhanced binding of transcription factors. The BRG1/brm-associated factors, or BAF, complex in mammals is functionally related to SWI/SNF and consists of 9 to 12 subunits, some of which are homologous to SWI/SNF subunits. A 57-kD BAF subunit, BAF57, is present in higher eukaryotes, but not in yeast. Partial coding sequence has been obtained from purified BAF57 from extracts of a human cell line [Wang et al., 1998, (60)]. Based on the peptide sequences, they identified cDNAs encoding BAF57. The predicted 411-amino acid protein contains an HMG domain adjacent to a kinesin-like region. Both recombinant BAF57 and the whole BAF complex bind 4-way junction (4WJ) DNA, which is thought to mimic the topology of DNA as it enters or exits the nucleosome. The BAF57 DNA-binding activity has characteristics similar to those of other HMG proteins. It was found that complexes with mutations in the BAF57 HMG domain retain their DNA-binding and nucleosome-disruption activities. They suggested that the mechanism by which mammalian SWI/SNF-like complexes interact with chromatin may involve recognition of higher-order chromatin structure by 2 or more DNA-binding domains. RNase protection studies and Western blot analysis revealed that BAF57 is expressed ubiquitously. Several lines of evidence point toward the involvement of SWI/SNF factors in cancer development [Klochendler-Yeivin et al., 2002, (61)]. Moreover, SWI/SNF related genes are assigned to chromosomal regions that are frequently involved in somatic rearrangements in human cancers [Ring et al., 1998, (62)]. In this respect it is interesting that some of the SWI/SNF family members (i.e. SMARCC1, SMARCC2, SMARCD1 and SMARCD22 are neighboring 3 of the eucaryotic ARCHEONs we have identified (i.e. 3p21-p24, 12q13-q14 and 17q respectively) and which are part of the present invention. In this invention we could also map SMARCE1/BAF57 to the 17q12 region by PCR karyotyping.

### KRT 10, K10

[0126] Keratin 10 is an intermediate filament (IF) chain which belongs to the acidic type I family and is expressed in terminally differentiated epidermal cells. Epithelial cells almost always co-express pairs of type I and type I keratins, and the pairs that are co-expressed are highly characteristic of a given epithelial tissue. For example, in human epidermis, 3 different pairs of keratins are expressed: keratins 5 (type II) and 14 (type I), characteristic of basal or proliferative cells; keratins 1 (type II) and 10 (type I), characteristic of superbasal terminally differentiating cells; and keratins 6 (type II) and 16 (type I) (and keratin 17 [type I]), characteristic of cells induced to hyper-proliferate by disease or injury, and epithelial cells grown in cell culture. The nucleotide sequence of a 1,700 bp cDNA encoding human epidermal keratin 10 (56.5 kD) [Darmon et al., 1987, (63)] has been published as well as the complete amino acid sequence of human keratin 10 [Zhou et al., 1988, (64)]. Polymorphism of the KRT10 gene, restricted to insertions and deletions of the glycine-richquasipeptide repeats that form the glycine-loop motif in the C-terminal domain, have been extensively described [Korge et al., 1992, (65)].

[0127] By use of specific cDNA clones in conjunction with somatic cell hybrid analysis and in situ hybridization, KRT10 gene has been mapped to 17q12-q21 in a region proximal to the breakpoint at 17q21 that is involved in a t(17;21)(q21;q22) translocation associated with a form of acute leukemia. KRT10 appeared to be telomeric to 3 other loci that map in the same region: CSF3, ERBA1, and HER2 [Lessin et al., 1988, (66)]. NGFR and HOX2 are distal to K9. It has been demonstrated that the KRT10, KRT13, and KRT15 genes are located in the same large pulsed field gel electrophoresis fragment [Romano et al., 1991, (67)]. A correlation of assignments of the 3 genes makes 17q21-q22 the likely location of the cluster. Transgenic mice expressing a mutant keratin 10 gene have the phenotype of epidermolytic hyperkeratosis, thus suggesting that a genetic basis for the human disorder resides in mutations in genes encoding suprabasal keratins KRT1 or KRT10 [Fuchs et al 1992, (68)]. The authors also showed that stimulation of basal cell proliferation can result from a defect in suprabasal cells and that distortion of nuclear shape or alterations in cytokinesis can occur when an intermediate filament network is perturbed. In a family with keratosis palmaris et plantaris without blistering either spontaneously or in response to mild mechanical or thermal stress and with no involvement of the skin and parts of the body other than the palms and soles, a tight linkage to an insertion-deletion polymorphism in the C-terminal coding region of the KRT10 gene (maximum lod score=8.36 at theta=0.00) was found [Rogaev et al., 1993, (69)]. It is noteworthy that it was a rare, high molecular weight allele of the KRT10 polymorphism that segregated with the disorder. The allele was observed once in 96 independent chromosomes from unaffected Caucasians. The KRT10 polymorphism arose from the insertion/deletion of imperfect (CCG)n repeats within the coding region and gave rise to a variable glycine loop motif in the C-terminal tail of the keratin 10 protein. It is possible that there was a pathogenic role for the expansion of the imperfect trinucleotide repeat.

### KRT12, K12

[0128] Keratins are a group of water-insoluble proteins that form 10 nm intermediate filaments in epithelial cells. Approximately 30 different keratin molecules have been identified. They can be divided into acidic and basic-neutral subfamilies according to their relative charges, immunoreactivity, and sequence homologies to types I and II wool keratins, respectively. In vivo, a basic keratin usually is co-expressed and ‘paired’ with a particular acidic keratin to form a heterodimer. The expression of various keratin pairs is tissue specific, differentiation dependent, and developmentally regulated. The presence of specific keratin pairs is essential for the maintenance of the integrity of epithelium. For example, mutations in human K14/K5 pair and the K10/K1 pair underlie the skin diseases, epidermolysis bullosa simplex and epidermolytic hyperkeratosis, respectively. Expression of the K3 and K12 keratin pair have been found in the cornea of a wide number of species, including human, mouse, and chicken, and is regarded as a marker for corneal-type epithelial differentiation. The murine Krt12 (Krt1.12) gene and demonstrated that its expression is corneal epithelial cell specific, differentiation dependent, and developmentally regulated [Liu et al., 1993, (70)]. The corneal-specific nature of keratin 12 gene expression signifies keratin 12 plays a unique role in maintaining normal corneal epithelial function. Nevertheless, the exact function of keratin 12 remains unknown and no hereditary human corneal epithelial disorder has been linked directly to the mutation in the keratin 12 gene. As part of a study of the expression profile of human corneal epithelial cells, a cDNA with an open reading frame highly homologous to the cornea-specific mouse keratin 12 gene has been isolated [Nishida et al., 1996, (71)]. To elucidate the function of keratin 12 knockout mice lacking the Krt1.12 gene have been created by gene targeting techniques. The heterozygous mice appeared normal. Homozygous mice developed normally and suffered mild corneal epithelial erosion. The corneal epithelia were fragile and could be removed by gentle rubbing of the eyes or brushing. The corneal epithelium of the homozygotes did not express keratin 12 as judged by immunohistochemistry, Western immunoblot analysis with epitope-specific anti-keratin 12 antibodies, Northern hybridization, and in situ hybridization with an antisense keratin 12 riboprobe. The KRT12 gene has been mapped to 17q by study of radiation hybrids and localized it to the type I keratin cluster in the interval between D17S800 and D17S930 (17q12-21) [Nishida et al., 1997, (72)]. The authors presented the exon-intron boundary structure of the KRT12 gene and mapped the gene to 17q12 by fluorescence in situ hybridization. The gene contains 7 introns, defining 8 exons that cover the coding sequence. Together the exons and introns span approximately 6 kb of genomic DNA.

[0129] Meesmann corneal dystrophy is an autosomal dominant disorder causing fragility of the anterior corneal epithelium, where the cornea-specific keratins K3 and K12 are expressed. Dominant-negative mutations in these keratins might be the cause of Meesmann corneal dystrophy. Indeed, linkage of the disorder to the K12 locus in Meesmann's original German kindred [Meesmann and Wilke, 1939, (73)] with Z(max)=7.53 at theta=0.0 has been found. In 2 pedigrees from Northern Ireland, they found that the disorder co-segregated with K12 in one pedigree and K3 in the other. Heterozygous missense mutations in K3 or in K12 (R135T, V143L,) in each family have been identified. All these mutations occurred in highly conserved keratin helix boundary motifs, where dominant mutations in other keratins have been found to compromise cytoskeletal function severely, leading to keratinocyte fragility.

[0130] The regions of the human KRT12 gene have been sequenced to enable mutation detection for all exons using genomic DNA as a template [Corden et al., 2000, (74)]. The authors found that the human genomic sequence spans 5,919 bp and consists of 8 exons. A microsatellite dinucleotide repeat was identified within intron 3, which was highly polymorphic and which they developed for use in genotype analysis. In addition, 2 mutations in the helix initiation motif of K12 were found in families with Meesmann corneal dystrophy. In an American kindred, a missense M129T mutation was found in the KRT12 gene. They stated that a total of 8 mutations in the KRT12 gene had been reported.

### Genetic Interactions within ARCHEONs

[0131] Genes involved in genomic alterations (amplifications, insertions, translocations, deletions, etc.) exhibit changes in their expression pattern. Of particular interest are gene amplifications, which account for gene copy numbers >2 per cell or deletions accounting for gene copy numbers <2 per cell. Gene copy number and gene expression of the respective genes do not necessarily correlate. Transcriptional overexpression needs an intact transcriptional context, as determined by regulatory regions at the chromosomal locus (promotor, enhancer and silencer), and sufficient amounts of transcriptional regulators being present in effective combinations. This is especially true for genomic regions, which expression is tightly regulated in specific tissues or during specific developmental stages. ARCHEONs are specified by gene clusters of more than two genes being directly neighbored or in chromosomal order, interspersed by a maximum of 10, preferably 7, more preferably 5 or at least 1 gene. The interspersed genes are also co-amplified but do not directly interact with the ARCHEON. Such an ARCHEON may spread over a chromosomal region of a maximum of 20, more preferably 10 or at least 6 Megabases. The nature of an ARCHEON is characterized by the simultaneous amplification and/or deletion and the correlating expression (i.e. upregulation or downregulation respectively) of the encompassed genes in a specific tissue, cell type, cellular or developmental state or time point. Such ARCHEONs are commonly conserved during evolution, as they play critical roles during cellular development. In case of these ARCHEONs whole gene clusters are overexpressed upon amplification as they harbor self-regulatory feedback loops, which stabilize gene expression and/or biological effector function even in abnormal biological settings, or are regulated by very similar transcription factor combinations, reflecting their simultaneous function in specific tissues at certain developmental stages. Therefore, the gene copy numbers correlates with the expression level especially for genes in gene clusters functioning as ARCHEONs. In case of abnormal gene expressions in neoplastic lesions it is of great importance to know whether the self-regulatory feedback loops have been conserved as they determine the biological activity of the ARCHEON gene members.

[0132] The intensive interaction between genes in ARCHEONs is described for the 17q21 ARCHEON (FIG. 1) by way of illustration not by limitation. In one embodiment the presence or absence of alterations of genes within distinct genomic regions are correlated with each other, as exemplified for breast cancer cell lines (FIG. 3 and FIG. 4). This confers to the discovery of the present invention, that multiple interactions of said gene products of defined chromosomal localizations happen, that according to their respective alterations in abnormal tissue have predictive, diagnostic, prognostic and/or preventive and therapeutic value. These interactions are mediated directly or indirectly, due to the fact that the respective genes are part of interconnected or independent signaling networks or regulate cellular behavior (differentiation status, proliferative and/or apoptotic capacity, invasiveness, drug responsiveness, immune modulatory activities) in a synergistic, antagonistic or independent fashion. The order of functionally important genes within the ARCHEONs has been conserved during evolution (e.g. the ARCHEON on human chromosome 17q21 is present on mouse chromosome 11). Moreover, it has been found that the 17q21 ARCHEON is also present on human chromosome 3p21 and 12q13, both of which are also involved in amplification events and in tumor development. Most probably these homologous ARCHEONs were formed by duplications and rearrangements during vertebrate evolution. Homologous ARCHEONs consist of homologous genes and/or isoforms of specific gene families (e.g. RARA or RARB or RARG, THRA or THRB, TOP2A or TOP2B, RAB5A or RAB5B, BAF170 or BAF 155, BAF60A or BAF60B, WNT5A or WNT5B, IGFBP4 or IGFBP6). Moreover these regions are flanked by homologous chromosomal gene clusters (e.g. CACN, SCYA, HOX, Keratins). These ARCHEONs have diverged during evolution to fulfill their respective functions in distinct tissues (e.g. the 17q21 ARCHEON has one of its main functions in the central nervous system). Due to their tissue specific function extensive regulatory loops control the expression of the members of each ARCHEON. During tumor development these regulations become critical for the characteristics of the abnormal tissues with respect to differentiation, proliferation, drug responsiveness, invasiveness. It has been found that the co-amplification of genes within ARCHEONs can lead to co-expression of the respective gene products. Some of said genes also exhibit additional mutations or specific patterns of polymorphisms, which are substantial for the oncogenic capacities of these ARCHEONs. It is one of the critical features of such amplicons, which members of the ARCHEON have been conserved during tumor formation (e.g. during amplification and deletion events), thereby defining these genes as diagnostic marker genes. Moreover, the expression of the certain genes within the ARCHEON can be influenced by other members of the ARCHEON, thereby defining the regulatory and regulated genes as target genes for therapeutic intervention. It was also observed, that the expression of certain members of the ARCHEON is sensitive to drug treatment (e.g. TOPO2 alpha, RARA, THRA, HER-2) which defines these genes as “marker genes”. Moreover several other genes are suitable for therapeutic intervention by antibodies (CACNB1, EBI1), ligands (CACNB1) or drugs like e.g. kinase inhibitors (CrkRS, CDC6). The following examples of interactions between members of ARCHEONs are offered by way of illustration, not by way of limitation.

[0133] EBI1/CCR7 is lymphoid-specific member of the G protein-coupled receptor family. EBI1 recognizes chemoattractants, such as interleukin-8, SCYAS, Rantes, CSa, and fMet-Leu-Phe. The capacity for cell division is largely confined to the CCR7⁺ subsets in lymphocytes. Double-negative cells did not divide or expand after stimulation. CCR7⁻ cells, considered to be terminally differentiated, fail to divide, but do produce interferon-gamma and express high levels of perforin. EBI1 is induced by viral activities such as the Eppstein-Barr-Virus. Therefore, EBI1 is associated with transformation events in lymphocytes. A functional role of EBI1 during tumor formation in non-lymphoid tissues has been investigated in this invention. Interestingly, also ERBA and ERBB, located in the same genomic region, are associated with lymphocyte transformation. Moreover, ligands of the receptor (i.e. SCYA5/Rantes) are in genomic proximity on 17q. Abnormal expression of both of these factors in lymphoid and non-lymphoid tissues establishes an autorgulatory feedback loop, inducing signaling events within the respective cells. Expression of lymphoid factors has effect on immune cells and modulates cellular behavior. This is of particular interest with regard to abnormal breast tissue being infiltrated by lymphocytes. In line with this, another immunmodulatory and proliferation factor is located nearby on 17q21. Granulocyte colony-stimulating factor (GCSF3) specifically stimulates the proliferation and differentiation of the progenitor cells for granulocytes. A stimulatory activity from a glioblastoma multiforme cell line being biologically and biochemically indistinguishable from GCSF produced by a bladder cell line has also been found. Colony-stimulating factors not only affects immune cells, but also induce cellular responses of non-immune cells, indicating possible involvement in tumor development upon abnormal expression. In addition several other genes of the 17q21 ARCHEON are involved in proliferation, survival, differentiation of immune cells and/or lymphoblastic leukemia, such as MLLT6, ZNF144 and ZNFN1A3, again demonstrating the related functions of the gene products in interconnected key processes within specific cell types. Aberrant expression of more than one of these genes in non-immune cells constitutes signalling activities, that contribute to the oncogenic activities that derive solely from overexpression of the Her-2/neu gene.

[0134] PPARBP has been found in complex with the tumorsuppressor gene of the p53 family. Moreover, PPARBP also binds to PPAR-alpha (PPARA), RAR-alpha (RARA), RXR, THRA and TR-beta-1. Due to it's ability to bind to thyroid hormone receptors it has been named TRIP2 and TRAP220. In this complexes PPARBP affects gene regulatory activities. Interestingly, PPARBP is located in genomic proximity to its interaction partners THRA and RARA. We have found PPARBP to be co-amplified with THRA and RARA in tumor tissue. THRA has been isolated from avian erytbroblastosis virus in conjunction with ERBB and therefore was named ERBA. ERBA potentiates ERBB by blocking differentiation of erythroblasts at an immature stage. ERBA has been shown to influence ERBB expression. In this setting deletions of C-terminal portions of the THRA gene product are of influence. Aberrant THRA expression has also been found in nonfunctioning pituitary tumors, which has been hypothesized to reflect mutations in the receptor coding and regulatory sequences. THRA function promotes tumor cell development by regulating gene expression of regulatory genes and by influencing metabolic activities (e.g. of key enzymes of alternative metabolic pathways in tumors such as malic enzyme and genes responsible for lipogenesis). The observed activities of nuclear receptors not only reflect their transactivating potential, but are also due to posttranscriptional activities in the absence or presence of ligands. Co-amplification of THRA/ERBA and ERBB has been shown, but its influence on tumor development has been doubted as no overexpression could be demonstrated in breast tumors [van de Vijver et al., 1987, (75)]. THRA and RARA are part of nuclear receptor family whose function can be mediated as monomers, homodimers or heterodimers. RARA regulates differentiation of a broad spectrum of cells. Interactions of hormones with ERBB expression has been investigated. Ligands of RARA can inhibit the expression of amplified ERBB genes in breast tumors [Offterdinger et al., 1998, (76)]. As being part of this invention co-amplification and co-expression of ThRA and RARA could be shown. It was also found that multiple genes, which are regulated by members of the thyroid hormone receptor—and retinoic acid receptor family, are differentially expressed in tumor samples, corresponding to their genomic alterations (amplification, mutation, deletion). These hormone receptor genes and respective target genes are useful to discriminate patient samples with respect to clinical features.

[0135] By expression analysis of multiple normal tissues, tumor samples and tumor cell lines and subsequent clustering of the 17q21 region, it was found that the expression profile of Her-2/neu positive tumor cells and tumor samples exhibits similarities with the expression pattern of tissue from the central nervous system (FIG. 2). This is in line with the observed malformations in the central nervous system of Her-2/neu and THRA knock-out mice. Moreover, it was found that NEUROD2, a nuclear factor involved specifically in neurogenesis, is commonly expressed in the respective samples. This led to the definition of the 17q21 Locus as being an “ARCHEON”, whose primary function in normal organ development is defined to the central nervous system. Surprisingly, the expression of NEUROD2 was affected by therapeutic intervention. Strikingly, also ZNF144, TEM7, PIP5K and PPP1R1B are expressed in neuronal cells, where they display diverse tissue specific functions.

[0136] In addition Her-2/neu is often co-amplified with GRB7, a downstream member of the signaling cascade being involved in invasive properties of tumors. Surprisingly, we have found another member of the Her-2/neu signaling cascade being overexpressed in primary breast tumors TOB1 (=“Transducer of ERBB signaling”). Strong overexpression of TOB1 corellated with weaker overexpression of Her-2/neu, already indicating its involvement in oncogenic signaling activities. Amplification of Her-2/neu has been assigned to enhanced proliferative capacity, due to the identified downstream components of the signaling cascade (e.g. Ras-Raf-MAPK). In this respect it was surprising that some cdc genes, which are cell cycle dependent kinases, are part of the amplicons, which upon altered expression have great impact on cell cycle progression.

[0137] The ARCHEONS on 17q21 and 12q13 are very closely related, as they do not only harbor isoforms of specific genes (e.g. CACNB1 vs. CACNB3, ERBB2 vs. ERBB3, RARA vs. RARG, see below), but are even flanked by whole gene clusters, consisting of multiple isoforms of one gene family positioned in tandem, such as the keratin and the HOX gene cluster. In this respect the simultaneous presence of keratins and receptors of the EGFR family, i.e. ERBB2 (Her-2/neu) and ERBB3 (Her-3) is of special interest, as the expression of individual keratins is very tightly controlled by the EGFR signalling pathway.

[0138] Keratins are a group of water-insoluble proteins that form 10 nm intermediate filaments in epithelial cells. Approximately 30 different keratin molecules have been identified. They can be divided into acidic and basic-neutral subfamilies according to their relative charges, immunoreactivity, and sequence homologies to types I and II wool keratins, respectively. In vivo, a basic keratin usually is co-expressed and ‘paired’ with a particular acidic keratin to form a heterodimer. The expression of various keratin pairs is tissue specific, differentiation dependent, and developmentally regulated. The presence of specific keratin pairs is essential for the maintenance of the integrity of epithelium. Alterations of keratin expression have been observed in tumor epithelium, with an abnormal keratin pattern being expressed in tumor cells compared to the adjacent normal tissue. Mutations in human K14/K5 pair and the K10/K1 pair underlie skin diseases such as epidermolysis bullosa simplex and epidermolytic hyperkeratosis. The expression of these and other keratins within the skin is tightly regulated. For example, the expression of K14/K5 pair is restricted to the basal cell layer of the skin displaying no overlap with the K10/K1 pair, which is solely expressed in the suprabasal layer. Gene expression is very tightly controlled by an interplay of multiple signalling cascades such as the EGFR, TGFR, sonic hedgehog and wnt-signaling, involving receptor tyrosine kinases and serin threonin kinases. In addition, posttranslational modifications such as serine/threonine and/or tyrosine phosphorylation events affect keratin function, and can be attributed to receptor tyrosine kinase signalling and MAPK and ERK activity. Posttranlational modifications of keratins not only alters the solubility of keratins, but also affects nuclear and signalling functions (e.g. after association with 14-3-3 protein). In addition, we did observe genomic alteration of the keratin gene clusters perturbing keratin expression pattern.

[0139] Moreover, the physical interaction of keratins, which are located in ARCHEONs of different chromosomes and whose cell type specific expression at distinct differentiation status is regulated by members of the same ARCHEONs is a superb example of the genetic interaction of ARCHEON genes. Examples of this tight interaction between the 12q13 and 17q21 ARCHEONs are the expression and physical interaction of keratin 5 (basic keratin Type II located on 12q13) and keratin 14 (acidic keratin Type I located on 17q21) in the basal layer of the skin, which is shut off in the suprabasal layer and compensated by the expression and physical interaction of keratin 1 (basic keratin Type II located on 12q13) and keratin 10 (acidic keratin Type I located on 17q21). Diverse control mechanisms confer this exclusive expression control including chromosomal positioning and growth factor signaling activities. Interestingly, critical keratins are chromosomally positioned in an ordered fashion reflecting their related but exclusive function in different keratin pairs and in specific tissues, resembling the structure and function relationship of the hox gene clusters on the same chromosomes. Moreover, keratins whose mutation result in specific skin disorders (e.g. mutation of K5 and K14 results in hand and foot syndrom) are located at similar positions within the ARCHEONs on chromosome 17q21 and 12q13. The genes are in close proximity to genes involved in signaling events (e.g. ERBBs and RARs) regulating proliferation, differentiation and apoptotic events also in the skin tissue. For example Her-2/neu is specifically expressed within the basal layer of the skin, where asymmetric cell divisions of adult stem cells or early progenitor cells thereof give rise to a non-differentiated daughter cell residing in the basal layer and a differentiating daughter cell which is subsequently moving to the suprabasal compartment. These assymetric cell divisions guarantee the self-renewal and the cellular homeostasis of the skin tissue. This is of importance for the biological functions of the skin such as barrier function towards the environmental stress including infectious agents. Perturbation of the signalling activities within the skin results in diseases similar to the hereditary disorders reflecting mutations of specific keratin genes. In clinical studies it has been shown, that blocking EGFR signalling by antibody-treatment (e.g. cetuximab) and small molecule inhibitors (e.g. Iressa) targeted to the receptor tyrosin kinases can result in skin diseases (e.g. acne-like rash) of grade I, II or III. It is part of this invention, that these skin diseases not only reflect side effects of the respective treatments, but are an example for systemic changes occurring as a consequence of therapeutic regimen, thereby indicating suscebility of the endogenous signaling network to the therapeutic agents. This observation can have consequences on therapeutic decisions, as the therapeutic regimen are normally stopped or is reduced upon occurrence of side effects. However, as the side effects (e.g. the skin diseases occurring under anti growth factor treatment) are indicative of response to treatment (e.g. tumor shrinkage), the treatment should be endured even though “adverse” drug responses occur and side effects should be treated separately by agents softening the symptoms. Skin diseases such as rash and hand and foot syndrome are just examples for a given side effect under a given treatment (i.e. anti tumor therapy), that can be used for response correlation.

[0140] Similarly to blocking receptor molecules itself, blocking downstream members of these signaling cascades results mainly in skin diseases (e.g. hand-and-foot syndroms). Surprisingly, we did observe, that treating tumor cells with agents blocking the EGFR/Her-2/neu signaling (e.g. Cetuximab, Iressa, Herceptin, RAF kinase inhibitor, etc.) shifts the expression of specific keratins being part of the ARCHEONS described in this invention. Moreover, the altered expression of keratins in tumor cells of patients is paralleled by a shift of keratin expression in the keratinocytes of the skin of the very same patient. Perturbation of keratin expression and or post-transcriptional modification in the skin tissue seems to resemble the suscebility of the endogenous growth factor signaling pathways to the respective treatment. The resulting skin diseases are therefore at least to some extent indicative of the tumor responsiveness to the regimen. This endogenous responsiveness to anti growth factor signaling agents can also be delineated from polymorphisms and genetic alterations (e.g. mutations) being present within the ARCHEON described in this invention. Of particular interest are in this context polymorphisms being present in the keratin genes. However, polymorphisms within keratins, keratin related genes and/or genes functionally connected to the keratin-based cytoskeleton, not necessarily being present within the ARCHEONs described, are also of importance according to their physical interaction with the respective gene products (e.g. ITGB4). It is part of this invention, that the responsiveness of a given tumor to anti growth factor treatment relates to the genetic predisposition of the respective signaling pathway members and target genes, which include keratins and related genes, that are markers for proliferation, differentiation and apoptosis in normal tissues, such as skin tissue. This knowledge can be used to predict the responsiveness of a tumor based on the characterization of surrogate tissues, such as skin, blood and any other normal tissue containing the above mentioned genes and/or gene products. For example the responsiveness to Iressa, RAF-kinase inhibitor and antibody based therapies targeting EGFR and Her-2/neu can be delineated from punch biopsies of the skin (preferably by comparison of pre- and/or post-treatment samples) or blood samples by determining the expression pattern or genetic characterization of keratin or keratin-related genes of an individual patient. Moreover, the responsiveness of such surrogate tissues can then be correlated to the tumor phenotype and the responsiveness of a tumor to the respective treatment, thereby predict therapy outcome. The examples of surrogate tissues are given by way of illustration and not by limitation.

[0141] It is yet another embodiment of the invention, that adverse drug responses such as heart toxicities can also be deduced from characteristics of the ARCHEONs described. Of particular interest are the ARCHEONs at 17q12-24, 12q13 and 3q21-26. It is known that anthracyclin based, anti-cancer regimens result in heart toxicities (such as dilated cardiomyopathies), as can be deduced e.g. by LVEF measurements. Moreover, anthracyclin pretreated patients have significantly increased heart toxicity events upon subsequent Herceptin™ based regimen. Interestingly, the ARCHEONs described in this invention not only harbor the primary targets of these therapies (i.e. topoisomerases and Her-2/neu), but also important structural and functional genes (Telethonin, PNMT, CACNB1, PPARBP, Her-2/neu, Her4) for muscle function including heart muscle function. These genes are involved in central processes of heart muscle function, such as tyrosine phosphorylation, serine/threonine phosphorylation, calcium influx, regulating e.g. central structural proteins such as titin. Moreover, these genes can be colocalized in heart muscles, displaying their functional interplay in this tissue. In mouse models, the mislocalization of telethonin and the genetic inactivation of Her-2/neu, Her4 and Neuregulin result in a similar phenotype as can be seen for cancer patients being treated with diverse anti-cancer drugs. The synergistic adverse drug response effect seen for the combinatorial treatment with anthracyclin and Herceptin™. Delineation of polymorphisms and haplotypes of the respective genes, genomic region and/or the ARCHEON structure are indicative of the susceptibility to suffer from heart toxicities upon anti-cancer drug treatment. This is important for therapy decisions and cancer treatment management, as the prior therapies conducted exclude subsequent treatment options. For example, anthracyclin-based pretreatment can exclude subsequent Herceptin™ treatment or lead to reduced dosages, if possible heart toxicities (e.g. dilated cardiomyopathies) cannot be excluded.

[0142] According to the observations described above the following examples of genes at 3q21-26 are offered by way of illustration, not by way of limitation.
[0143] WNT5A, CACNA1D, THRB, RARB, TOP2B, RAB5B, SMARCC1 (BAF155), RAF, WNT7A

[0144] The following examples of genes at 12q13 are offered by way of illustration, not by way of limitation.
[0145] CACNB3, Keratins, ERBB3, NR4A1, RAB5/13, RARG, STAT6, WNT10B, (GCN5), (SAS: Sarcoma Amplified Sequence), SMARCC2 (BAF170), SMARCD1 (BAF60A), (GAS41: Glioma Amplified Sequence), (CHOP), Her3, KRTHB, HOX C, IGFBP6, WNT5B

[0146] There is cross-talk between the amplified ARCHEONs described above and some other highly amplified genomic regions locate approximately at 1p13, 1q32, 2p16, 2q21, 3p12, 5p13, 6p12, 7p12, 7q21, 8q23, 11q13, 13q12, 19q13, 20q13 and 21q11. The above mentioned chromosomal regions are described by way of illustration not by way of limitation, as the amplified regions often span larger and/or overlapping positions at these chromosomal positions.

[0147] Additional alterations of non-transcribed genes, pseudogenes or intergenic regions of said chromosomal locations can be measured for prediction, diagnosis, prognosis, prevention and treatment of malignant neoplasia and breast cancer in particular. Some of the genes or genomic regions have no direct influence on the members of the ARCHEONs or the genes within distinct chromosomal regions but still retain marker gene function due to their chromosomal positioning in the neighborhood of functionally critical genes (e.g. Telethonin neighboring the Her-2/neu gene).

### Clinical Relevance of the Genes which are Part of the 17q21 Archeon for Response to Herceptin Treatment

[0148] Clinical Samples of patients being treated with Herceptin, docetaxel, paclitaxel, taxotere, carboplatin, cisplatin, oxaliplatin, vinorelbine, tamoxifen, anastrozole, letrozole, tamoxifen, epirubicin, doxorubicin and CMF were obtained. Primary tumor tissues and lymphnode tissues were obtained from neoadjuvant and adjuvant settings. In addition, biopsy material of first and second line therapies was obtained in some cases from metastatic lesions. These samples included formalin-fixed and paraffin-embedded material or fresh tissue from primary tumours and metastatic lesions of the respective patients. Moreover, whole blood, serum and plasma samples were included in the analysis.

[0149] Multiparametric, clinical assessment of the response to Herceptin in combination with chemotherapeutics (e.g. docetaxel, taxotere, paclitaxel, vinorelbine, carboplatin, cisplatin), or other therapies described below, was performed, based on clinical information, such as histological parameters (TNM-Stage, AJCC grade), standard molecular markers (IHC staining for estrogen receptor, progesteron receptor, Her-2/neu) and sonographical or radiological assessment (e.g. CT). In addition to combinatorial treatment, samples from single agent therapies were evaluated. Response to treatment was evaluated according to international standards. The ARCHEON genes were analyzed on DNA, RNA or protein level. Normalization of the ARCHEON genes was done by intra- or extracbromosomal reference genes (see EXAMPLE 3 below) or by housekeeping genes of diverse expression level.

[0150] We could delineate specific regions of the ARCHEON to be informative for the response to a Herceptin-based therapy. As depicted below, genes that are located towards the centromer or telomer of an individual chromosome in relation to a centrally localized gene within an ARCHEON (e.g. Her-2/neu in the 17q21 ARCHEON) are in the following named to be “centromeric” and “telomeric”, respectively. Of particular interest for response to Herceptin-based treatment are genes being centromeric from the Her-2/neu gene locus on 17q21. The integrity of this centromeric ARCHEON region is of importance for the phenotype of Her-2/neu positive tumors. Genetic alteration in the chromosomal region of PIP5KB, FLJ20291, MLN50, TEM7, CACNB1, RPL19, MGC15482, PPARBP, CrkRS are critical for clinical outcome of Her-2/neu positive breast tumors. Of particular interest is the centromeric breakpoint region of the 17q21 ARCHEON nearby the genes TEM7, CACNB1, CrkRS and PPARBP. Her-2/neu positive tumors bearing elevated gene copy numbers of TEM7, CACNB1, CrkRS and PPARBP compared to other Her-2/neu positive tumors and/or normal tissue controls do have a worsened clinical outcome and a poor response to Herceptin based treatment. The genes within this region are involved in calcium and inositol signalling, which is fundamental with regard to cell survival mechanisms (e.g. CACNB1, PPP1R1B and PIP5K2B). Overexpression of CrkRS is of importance for the tumor phenotype, as its kinase activity regulates the RNA polymerase II holoenzyme complex. Especially the phosphorylation of the C-terminal domain and its associated components not only has influence on the general activity of the enzyme complex, but also affects gene products, whose importance for tumor cell growth has been demonstrated and some of which are part of the ARCHEONs (e.g. the SWI/SNF components SMARCs, e.g. SMARCC2, are critical for RB mediated tumor suppression). Phosphorylation of SMARCs is tightly regulated during cell cycle progression and affects the biological, function of the SMARCs (influence on activity, stability and cellular localization). Altered phosphorylation of the RNA polymerase holoenzyme complex by CrkRS therefore most probably affects cell cycle progression. Moreover, the abnormal expression of TEM7, which we found to be elevated in a subclass of Her-2/neu positive tumors, whereas it was originally identified to be a tumor endothelial marker (TEM; see above), points towards an intense interplay between tumor and endothelial cells resulting in a more aggressive behaviour of the respective tumor cells during metastasic processes such as intra- and extravasation. Strikingly, the genes within this region, i.e. ZNF144, TEM7, PIP5K, PPP1R1B and CACNB1, all do have physiological functions within the central nervous system. Therefore, we do assume, that a “neuronal environment” would be favourable for tumor cells overexpressing these genes resulting in growth and survival advantages for these particular tumor cells. In accordance with this, it is observed that Herceptin resistant metastasis frequently occur in the brain. So far it has been discussed, that this observation refers to toxicological problems such as drug-biovailability with respect to the blood brain barrier. It is part of this invention, that genes which are normally expressed within neuronal cells are integral part of the centromeric gene cluster of the ARCHEON on chromosome 17q21 and are involved in de novo and acquired resistance to Herceptin based treatment. Independent amplification units and/or deletion of singular genes of this centromeric cluster due to chromosomal breakage interferes with the survival and resistance function of this genomic region. Therefore the continuity of amplification units is another important feature with regard to responsivenessor unresponsiveness to therapy. It is noteworthy to mention, that not only the presence of particular genes, but also the presence of regulatory elements within this genomic region contribute to the above mentioned biological phenotype. Therefore also the loss or gain of regulatory elements within the centromeric part of the ARCHEON is of importance for resistance to anti cancer treatment and therefore part of this invention.

[0151] In addition to the alteration of centromeric ARCHEON region, the total length of the ARCHEON with regard to the telomeric region and the relative gene copy numbers of the amplified genes are of importance. Particularly the integrity of the genomic region harboring the TOP2alpha gene with the surrounding genes THRA, NR1D1, MLN51, WIRE, HsCDC6, RARA, CTEN, IGFBP4, EBI1 and SMARCE1 is of interest. Her-2/neu positive tumors, that are deleted in at least some of this genes exhibit a worsened response to herceptin-based chemotherapy. This demonstrates, that this region is not only of prognostic value for anthracyclin-based therapy, but also of prognostic value for chemotherapeutic treatment with taxol-related agents and platin salts. The amplification, deletion or silencing of this telomeric region is accompanied with altered sensitivity to the above mentioned chemotherapeutics. This is a general feature of tumors bearing alterations (with regard to gene expression and/or amplification of the 17q21 ARCHEON) and not only true for breast cancer. In line with this, we have analyzed ovarian tumors bearing alterations in the 17q21 ARCHEON and correlated the clinical outcome, that was assessed similarly as depicted above, with regard to a platin salt based therapy. Strikingly, tumors with defined genetic patterns within this telomeric regions did develop resistance to this chemotherapeutic regimen. Detecting solely the coamplification of Her-2/neu and TOP2alpha was not as informative with regard to response prediction as a detailed characterization and subsequent response correlation with the region of the THRA, NR1D1, MLN51, WIRE, HsCDC6 and RARA genes. It is part of this invention, that the proliferation status of tumors is affected by genes within ARCHEON regions. The 17q21 ARCHEON determines to at least some extent the proliferation rate of tumor cells. Interestingly, Her-2/neu positive tumors bearing elevated levels of a more limited number of genes, excluding several genes in the telomeric region (i.e. TOP2alpha, HsCDC6) exhibit a relatively slow growth rate, which diminishes the effect of chemotherapeutic drugs targeting proliferating cells and is one of the reasons for the resistance of these tumors to said agents. Instead, these tumors have a higher capacity with regard to invasiveness and do have a diminished apoptotic rate, which to some extent refers to the signaling of Her-2/neu via GRB7 and AKT kinase (also affected by inositols and calcium, see above), respectively. Several genes within the telomeric region of the ARCHEONs affect Her-2/neu signalling, such as RARA, THRA, IGFBP4, and alter the respective characteristics of the cells including proliferation status.

[0152] The ARCHEONs being part of this invention, are not only important for clinical response of tumors to antibody-based therapies raised against EGFR- and Her-2/neu signaling (e.g. Herceptin, 2C4 or cetuximab regimen) and to chemotherapeutic agents, but also are of importance for diverse strategies of anti hormonal treatment (e.g. Tamoxifen, Raloxifen, anastrozol, letrozol, faslodex). In particular, elevated levels of the PPARBP gene and protein and the integrity of the telomeric hormone receptor region of the 17q21 ARCHEON, bearing THRA, NR1D1 and RARA, or its related regions on the other ARCHEONs are of importance for these therapeutic regimens. In a retrospective, clinical study evaluating the above mentioned clinical parameters for adjuvant treatment of breast cancer with tamoxifen, we did observe, that the overexpression of PPARBP has impact on the overall survival of patients receiving this therapy. Overexpression of PPARBP enables activity of estrogen and progesteron receptors irrespective of a bound ligand. Therefore, the deregulation of the PPARBP results in the activity of these hormone receptors in the absence of the hormones and even in the presence of anti-hormones and thereby circumvents the anti tumor effect of anti hormonal strategies resulting in resistance of PPARBP overexpressing cells. In addition overexpression of hormone receptors other than estrogen receptor in tumor cells affects activity of estrogen or the respective anti-hormones by competition for dimerization partners, such as RXR, or transcriptional activator or repressor genes, such as CBP or NCOR. With regard to tamoxifen treatment this clearly diminishes the effect of the anti-hormone, as the pool of the transcriptional cofactors is reduced for the classical mode of action of tamoxifen within the nucleus.

[0153] The invention further relates to the use of:
[0154] A) a polynucleotide comprising at least one of the sequences of SEQ ID NO: 1 to 26 or 53 to 75;
[0155] B) a polynucleotide which hybridizes under stringent conditions to a polynucleotide specified in (a) encoding a polypeptide exhibiting the same biological function as specified for the respective sequence in Table 2 or 3
[0156] C) a polynucleotide the sequence of which deviates from the polynucleotide specified in (a) and (b) due to the generation of the genetic code encoding a polypeptide exhibiting the same biological function as specified for the respective sequence in Table 2 or 3
[0157] D) a polynucleotide which represents a specific fragment, derivative or allelic variation of a polynucleotide sequence specified in (a) to (c)
[0158] E) an antisense molecule targeting specifically one of the polynucleotide sequences specified in (a) to (d);
[0159] F) a purified polypeptide encoded by a polynucleotide sequence specified in (a) to (d)
[0160] G) a purified polypeptide comprising at least one of the sequences of SEQ ID NO: 27 to 52 or 76 to 98;
[0161] H) an antibody capable of binding to one of the polynucleotide specified in (a) to (d) or a polypeptide specified in (f) and (g)
[0162] I) a reagent identified by any of the methods of claim 14 to 16 that modulates the amount or activity of a polynucleotide sequence specified in (a) to (d) or a polypeptide specified in (f) and (g)

[0163] In the preparation of a composition for the prevention, prediction, diagnosis, prognosis or a medicament for the treatment of malignant neoplasia and breast cancer in particular.

### Polynucleotides

[0164] A “BREAST CANCER GENE” polynucleotide can be single- or double-stranded and comprises a coding sequence or the complement of a coding sequence for a “BREAST CANCER GENE” polypeptide. Degenerate nucleotide sequences encoding human “BREAST CANCER GENE” polypeptides, as well as homologous nucleotide sequences which are at least about 50, 55, 60, 65, 70, preferably about 75, 90, 96, or 98% identical to the nucleotide sequences of SEQ ID NO: 1 to 26 or 53 to 75 also are “BREAST CANCER GENE” polynucleotides. Percent sequence identity between the sequences of two polynucleotides is determined using computer programs such as ALIGN which employ the FASTA algorithm, using an affine gap search with a gap open penalty of −12 and a gap extension penalty of −2. Complementary DNA (cDNA) molecules, species homologues, and variants of “BREAST CANCER GENE” polynucleotides which encode biologically active “BREAST CANCER GENE” polypeptides also are “BREAST CANCER GENE” polynucleotides.

### Preparation of Polynucleotides

[0165] A naturally occurring “BREAST CANCER GENE” polynucleotide can be isolated free of other cellular components such as membrane components, proteins, and lipids. Polynucleotides can be made by a cell and isolated using standard nucleic acid purification techniques, or synthesized using an amplification technique, such as the polymerase chain reaction (PCR), or by using an automatic synthesizer. Methods for isolating polynucleotides are routine and are known in the art.

[0166] Any such technique for obtaining a polynucleotide can be used to obtain isolated “BREAST CANCER GENE” polynucleotides. For example, restriction enzymes and probes can be used to isolate polynucleotide fragments which comprises “BREAST CANCER GENE” nucleotide sequences. Isolated polynucleotides are in preparations which are free or at least 70, 80, or 90% free of other molecules.

[0167] “BREAST CANCER GENE” cDNA molecules can be made with standard molecular biology techniques, using “BREAST CANCER GENE” mRNA as a template. Any RNA isolation technique which does not select against the isolation of mRNA may be utilized for the purification of such RNA samples. See, for example, Sambrook et al., 1989, (77); and Ausubel, F. M. et al., 1989, (78), both of which are incorporated herein by reference in their entirety. Additionally, large numbers of tissue samples may readily be processed using techniques well known to those of skill in the art, such as, for example, the single-step RNA isolation process of Chomczynski, P. (1989, U.S. Pat. No. 4,843,155), which is incorporated herein by reference in its entirety.

[0168] “BREAST CANCER GENE” cDNA molecules can thereafter be replicated using molecular biology techniques known in the art and disclosed in manuals such as Sambrook et al., 1989, (77). An amplification technique, such as PCR, can be used to obtain additional copies of polynucleotides of the invention, using either human genomic DNA or cDNA as a template.

[0169] Alternatively, synthetic chemistry techniques can be used to synthesizes “BREAST CANCER GENE” polynucleotides. The degeneracy of the genetic code allows alternate nucleotide sequences to be synthesized which will encode a “BREAST CANCER GENE” polypeptide or a biologically active variant thereof.

### Identification of Differential Expression

[0170] Transcripts within the collected RNA samples which represent RNA produced by differentially expressed genes may be identified by utilizing a variety of methods which are ell known to those of skill in the art. For example, differential screening [Tedder, T. F. et al., 1988, (79)], subtractive hybridization [Hedrick, S. M. et al., 1984, (80); Lee, S. W. et al., 1984, (81)], and, preferably, differential display (Liang, P., and Pardee, A. B., 1993, U.S. Pat. No. 5,262,311, which is incorporated herein by reference in its entirety), may be utilized to identify polynucleotide sequences derived from genes that are differentially expressed.

[0171] Differential screening involves the duplicate screening of a cDNA library in which one copy of the library is screened with a total cell cDNA probe corresponding to the mRNA population of one cell type while a duplicate copy of the cDNA library is screened with a total cDNA probe corresponding to the mRNA population of a second cell type. For example, one cDNA probe may correspond to a total cell cDNA probe of a cell type derived from a control subject, while the second cDNA probe may correspond to a total cell cDNA probe of the same cell type derived from an experimental subject. Those clones which hybridize to one probe but not to the other potentially represent clones derived from genes differentially expressed in the cell type of interest in control versus experimental subjects.

[0172] Subtractive hybridization techniques generally involve the isolation of mRNA taken from two different sources, e.g., control and experimental tissue, the hybridization of the mRNA or single-stranded cDNA reverse-transcribed from the isolated mRNA, and the removal of all hybridized, and therefore double-stranded, sequences. The remaining non-hybridized, single-stranded cDNAs, potentially represent clones derived from genes that are differentially expressed in the two mRNA sources. Such single-stranded cDNAs are then used as the starting material for the construction of a library comprising clones derived from differentially expressed genes.

[0173] The differential display technique describes a procedure, utilizing the well known polymerase chain reaction (PCR; the experimental embodiment set forth in Mullis, K. B., 1987, U.S. Pat. No. 4,683,202) which allows for the identification of sequences derived from genes which are differentially expressed. First, isolated RNA is reverse-transcribed into single-stranded cDNA, utilizing standard techniques which are well known to those of skill in the art. Primers for the reverse transcriptase reaction may include, but are not limited to, oligo dT-containing primers, preferably of the reverse primer type of oligonucleotide described below. Next, this technique uses pairs of PCR primers, as described below, which allow for the amplification of clones representing a random subset of the RNA transcripts present within any given cell. Utilizing different pairs of primers allows each of the mRNA transcripts present in a cell to be amplified. Among such amplified transcripts may be identified those which have been produced from differentially expressed genes.

[0174] The reverse oligonucleotide primer of the primer pairs may contain an oligo dT stretch of nucleotides, preferably eleven nucleotides long, at its 5′ end, which hybridizes to the poly(A) tail of mRNA or to the complement of a cDNA reverse transcribed from an mRNA poly(A) tail. Second, in order to increase the specificity of the reverse primer, the primer may contain one or more, preferably two, additional nucleotides at its 3′ end. Because, statistically, only a subset of the mRNA derived sequences present in the sample of interest will hybridize to such primers, the additional nucleotides allow the primers to amplify only a subset of the mRNA derived sequences present in the sample of interest. This is preferred in that it allows more accurate and complete visualization and characterization of each of the bands representing amplified sequences.

[0175] The forward primer may contain a nucleotide sequence expected, statistically, to have the ability to hybridize to cDNA sequences derived from the tissues of interest. The nucleotide sequence may be an arbitrary one, and the length of the forward oligonucleotide primer may range from about 9 to about 13 nucleotides, with about 10 nucleotides being preferred. Arbitrary primer sequences cause the lengths of the amplified partial cDNAs produced to be variable, thus allowing different clones to be separated by using standard denaturing sequencing gel electrophoresis. PCR reaction conditions should be chosen which optimize amplified product yield and specificity, and, additionally, produce amplified products of lengths which may be resolved utilizing standard gel electrophoresis techniques. Such reaction conditions are well known to those of skill in the art, and important reaction parameters include, for example, length and nucleotide sequence of oligonucleotide primers as discussed above, and annealing and elongation step temperatures and reaction times. The pattern of clones resulting from the reverse transcription and amplification of the mRNA of two different cell types is displayed via sequencing gel electrophoresis and compared. Differences in the two banding patterns indicate potentially differentially expressed genes.

[0176] When screening for full-length cDNAs, it is preferable to use libraries that have been size-selected to include larger cDNAs. Randomly-primed libraries are preferable, in that they will contain more sequences which contain the 5′ regions of genes. Use of a randomly primed library may be especially preferable for situations in which an oligo d(T) library does not yield a full-length cDNA. Genomic libraries can be useful for extension of sequence into 5′ nontranscribed regulatory regions.

[0177] Commercially available capillary electrophoresis systems can be used to analyze the size or confirm the nucleotide sequence of PCR or sequencing products. For example, capillary sequencing can employ flowable polymers for electrophoretic separation, four different fluorescent dyes (one for each nucleotide) which are laser activated, and detection of the emitted wavelengths by a charge coupled device camera. Output/light intensity can be converted to electrical signal using appropriate software (e.g. GENOTYPER and Sequence NAVIGATOR, Perkin Elmer, ABI), and the entire process from loading of samples to computer analysis and electronic data display can be computer controlled. Capillary electrophoresis is especially preferable for the sequencing of small pieces of DNA which might be present in limited amounts in a particular sample.

[0178] Once potentially differentially expressed gene sequences have been identified via bulk techniques such as, for example, those described above, the differential expression of such putatively differentially expressed genes should be corroborated. Corroboration may be accomplished via, for example, such well known techniques as Northern analysis and/or RT-PCR. Upon corroboration, the differentially expressed genes may be further characterized, and may be identified as target and/or marker genes, as discussed, below.

[0179] Also, amplified sequences of differentially expressed genes obtained through, for example, differential display may be used to isolate full length clones of the corresponding gene. The full length coding portion of the gene may readily be isolated, without undue experimentation, by molecular biological techniques well known in the art. For example, the isolated differentially expressed amplified fragment may be labeled and used to screen a cDNA library. Alternatively, the labeled fragment may be used to screen a genomic library.

[0180] An analysis of the tissue distribution of the mRNA produced by the identified genes may be conducted, utilizing standard techniques well known to those of skill in the art. Such techniques may include, for example, Northern analyses and RT-PCR. Such analyses provide information as to whether the identified genes are expressed in tissues expected to contribute to breast cancer. Such analyses may also provide quantitative information regarding steady state mRNA regulation, yielding data concerning which of the identified genes exhibits a high level of regulation in, preferably, tissues which may be expected to contribute to breast cancer.

[0181] Such analyses may also be performed on an isolated cell population of a particular cell type derived from a given tissue. Additionally, standard in situ hybridization techniques may be utilized to provide information regarding which cells within a given tissue express the identified gene. Such analyses may provide information regarding the biological function of an identified gene relative to breast cancer in instances wherein only a subset of the cells within the tissue is thought to be relevant to breast cancer.

[0182] Identification of Co-Amplified Genes

[0183] Genes involved in genomic alterations (amplifications, insertions, translocations, deletions, etc.) are identified by PCR-based karyotyping in combination with database analysis. Of particular interest are gene amplifications, which account for gene copy numbers >2 per cell. Gene copy number and gene expression of the respective genes often correlates. Therefore clusters of genes being simultaneously overexpressed due to gene amplifications can be identified by expression analysis via DNA-chip technologies or quantitative RTPCR. For example, the altered expression of genes due to increased or decreased gene copy numbers can be determined by GeneArray technologies from Affymetrix or qRT-PCR with the TaqMan or iCycler Systems. Moreover combination of RNA with DNA analytic enables highly parallel and automated characterization of multiple genomic regions of variable length with high resolution in tissue or single cell samples. Furthermore these assays enable the correlation of gene transcription relative to gene copy number of target genes. As there is not necessarily a linear correlation of expression level and gene copy number and as there are synergistic or antagonistic effects in certain gene clusters, the identification on the RNA-level is easier and probably more relevant for the biological outcome of the alterations especially in tumor tissue.

### Detection of Co-Amplified Genes in Malignant Neoplasia

[0184] Chromosomal changes are commonly detected by FISH (=Fluorescence-In-Situ-Hybridization) and CGH (=Comparative Genomic Hybridization). For quantification of genomic regions genes or intergenic regions can be used. Such quantification measures the relative abundance of multiple genes with respect to each other (e.g. target gene vs. centromeric region or housekeeping genes). Changes in relative abundance can be detected in paraffin-embedded material even after extraction of RNA or genomic DNA. Measurement of genomic DNA has advantages compared to RNA-analysis due to the stability of DNA, which accounts for the possibility to perform also retrospective studies and offers multiple internal controls (genes not being altered, amplified or deleted) for standardization and exact calculations. Moreover, PCR-analysis of genomic DNA offers the advantage to investigate intergenic, highly variable regions or combinations of SNP's (=Single Nucleotide Polymorphisms), RFLPs, VNTRs and STRs (in general polymorphic markers). Determination of SNPs or polypmorphic markers within defined genomic regions (e.g. SNP analysis by “Pyrosequencing™”) has impact on the phenotype of the genomic alterations. For example it is of advantage to determine combinations of polymorphisms or haplotypes in order to characterize the biological potential of genes being part of amplified alleles. Of particular interest are polymorphic markers in breakpoint regions, coding regions or regulatory regions of genes or intergenic regions. By determining predictive haplotypes with defined biological or clinical outcome it is possible to establish diagnostic and prognostic assays with non-tumor samples from patients. Depending on whether preferably one allele or both alleles to same extent are amplified (=linear or non-linear amplifications) haplotypes can be determined. Overrepresentation of specific polymorphic markers combinations in cells or tissues with gene amplifications facilitates haplotype determination, as e.g. combinations of heterozygous polymorphic markers in nucleic acids isolated from normal tissues, body fluids or biological samples of one patient become almost homozygous in neoplastic tissue of the very same patient. This “gain of homozygosity” corresponds to the measurement of altered genomic region due to amplification events and is suitable for identification of “gain of function”—alterations in tumors, which result in e.g. oncogenic or growth promoting activities. In contrast, the detection of “losses of heterozygosity” is used for identification of anti-oncogenes, gate keeper genes or checkpoint genes, that suppress oncogenic activities and negatively regulate cellular growth processes. This intrinsic difference clearly opposes the impact of the respective genomic regions for tumor development and emphasizes the significance of “gain of homozygosity” measurements disclosed in this invention. In addition to the analyses on SNPs, a comparative approach of blood leucocyte DNA and tumor DNA based on VNTR detection can reveal the existance of a formerly described ARCHEON. SNP and VNTR sequences and primer sets most suitable for detection of the ARCHEON at 17q11-21 are disclosed in Table 4 and Table 6. Detection, quantification and sizing of such polymorphic markers can be achieved by methods known to those with skill in the art. In one embodiment of this invention we disclose the comparative measurement of amount and size of any of the disclosed VNTRs (Table 6) by PCR amplification and capillary electrophoresis. PCR can be carried out by standart protocols favorably in a linear amplification range (low cycle number) and detection by CE should be carried out by suppliers protocols (e.g. Agilent). More favorably the detection of the VNTRs disclosed in Table 6 can be carried out in a multiplex fashion, utilizing a variety of labeled primers (e.g. fluorescent, radioactive, bioactive) and a suitable CE detection system (e.g. ABI 310). However the detection can also be performed on slab gels consisting of highly concentrated agarose or polyacrylamide with a monochromal DNA stain. Enhancement of resolution can be achieved by appropriate primer design and length variation to give best results in multiplex PCR.

[0185] It is also of interest to determine covalent modifications of DNA (e.g. methylation) or the associated chromatin (e.g. acetylation or methylation of associated proteins) within the altered genomic regions, that have impact on transcriptional activity of the genes. In general, by measuring multiple, short sequences (60-300 bp) these techniques enable high-resolution analysis of target regions, which cannot be obtained by conventional methods such as FISH analytic (2-100 kb). Moreover the PCR-based DNA analysis techniques offer advantages with regard to sensitivity, specificity, multiplexing, time consumption and low amount of patient material required. These techniques can be optimized by combination with microdissection or macrodissection to obtain purer starting material for analysis.

### Extending Polynucleotides

[0186] In one embodiment of such a procedure for the identification and cloning of full length gene sequences, RNA may be isolated, following standard procedures, from an appropriate tissue or cellular source. A reverse transcription reaction may then be performed on the RNA using an oligonucleotide primer complimentary to the mRNA that corresponds to the amplified fragment, for the priming of first strand synthesis. Because the primer is anti-parallel to the mRNA, extension will proceed toward the 5′ end of the mRNA. The resulting RNA hybrid may then be “tailed” with guanines using a standard terminal transferase reaction, the hybrid may be digested with RNase H, and second strand synthesis may then be primed with a poly-C primer. Using the two primers, the 5′ portion of the gene is amplified using PCR Sequences obtained may then be isolated and recombined with previously isolated sequences to generate a full-length cDNA of the differentially expressed genes of the invention. For a review of cloning strategies and recombinant DNA techniques, see e.g., Sambrook et al., (77); and Ausubel et al., (78).

[0187] Various PCR-based methods can be used to extend the polynucleotide sequences disclosed herein to detect upstream sequences such as promoters and regulatory elements. For example, restriction site PCR uses universal primers to retrieve unknown sequence adjacent to a known locus [Sarkar, 1993, (82)]. Genomic DNA is first amplified in the presence of a primer to a linker sequence and a primer specific to the known region. The amplified sequences are then subjected to a second round of PCR with the same linker primer and another specific primer internal to the first one. Products of each round of PCR are transcribed with an appropriate RNA polymerase and sequenced using reverse transcriptase.

[0188] Inverse PCR also can be used to amplify or extend sequences using divergent primers based on a known region [Triglia et al., 1988, (83)]. Primers can be designed using commercially available software, such as OLIGO 4.06 Primer Analysis software (National Biosciences Inc., Plymouth, Minn.), to be e.g. 2230 nucleotides in length, to have a GC content of 50% or more, and to anneal to the target sequence at temperatures about 68-72° C. The method uses several restriction enzymes to generate a suitable fragment in the known region of a gene. The fragment is then circularized by intramolecular ligation and used as a PCR template.

[0189] Another method which can be used is capture PCR, which involves PCR amplification of DNA fragments adjacent to a known sequence in human and yeast artificial chromosome DNA [Lagerstrom et al., 1991, (84)]. In this method, multiple restriction enzyme digestions and ligations also can be used to place an engineered double-stranded sequence into an unknown fragment of the DNA molecule before performing PCR.

[0190] Additionally, PCR, nested primers, and PROMOTERFINDER libraries (CLONTECH, Palo Alto, Calif.) can be used to walk genomic DNA (CLONTECH, Palo Alto, Calif.). This process avoids the need to screen libraries and is useful in finding intron/exon junctions.

[0191] The sequences of the identified genes may be used, utilizing standard techniques, to place the genes onto genetic maps, e.g., mouse [Copeland & Jenkins, 1991, (85)] and human genetic maps [Cohen, et al., 1993, (86)]. Such mapping information may yield information regarding the genes' importance to human disease by, for example, identifying genes which map near genetic regions to which known genetic breast cancer tendencies map.

### Identification of Polynucleotide Variants and Homologues or Splice Variants

[0192] Variants and homologues of the “BREAST CANCER GENE” polynucleotides described above also are “BREAST CANCER GENE” polynucleotides. Typically, homologous “BREAST CANCER GENE” polynucleotide sequences can be identified by hybridization of candidate polynucleotides to known “BREAST CANCER GENE” polynucleotides under stringent conditions, as is known in the art. For example, using the following wash conditions: 2×SSC (0.3 M NaCl, 0.03 M sodium citrate, pH 7.0), 0.1% SDS, room temperature twice, 30 minutes each; then 2×SSC, 0.1% SDS, 50 EC once, 30 minutes; then 2×SSC, room temperature twice, 10 minutes each homologous sequences can be identified which contain at most about 25-30% basepair mismatches. More preferably, homologous polynucleotide strands contain 15-25% basepair mismatches, even more preferably 5-15% basepair mismatches.

[0193] Species homologues of the “BREAST CANCER GENE” polynucleotides disclosed herein also can be identified by making suitable probes or primers and screening cDNA expression libraries from other species, such as mice, monkeys, or yeast. Human variants of “BREAST CANCER GENE” polynucleotides can be identified, for example, by screening human cDNA expression libraries. It is well known that the Tₘ of a double-stranded DNA decreases by 1-1.5° C. with every 1% decrease in homology [Bonner et al., 1973, (87)]. Variants of human “BREAST CANCER GENE” polynucleotides or “BREAST CANCER GENE” polynucleotides of other species can therefore be identified by hybridizing a putative homologous “BREAST CANCER GENE” polynucleotide with a polynucleotide having a nucleotide sequence of one of the sequences of the SEQ ID NO: 1 to 26 or 53 to 75 or the complement thereof to form a test hybrid. The melting temperature of the test hybrid is compared with the melting temperature of a hybrid comprising polynucleotides having perfectly complementary nucleotide sequences, and the number or percent of basepair mismatches within the test hybrid is calculated.

[0194] Nucleotide sequences which hybridize to “BREAST CANCER GENE” polynucleotides or their complements following stringent hybridization and/or wash conditions also are “BREAST CANCER GENE” polynucleotides. Stringent wash conditions are well known and understood in the art and are disclosed, for example, in Sambrook et al., (77). Typically, for stringent hybridization conditions a combination of temperature and salt concentration should be chosen that is approximately 12-20° C. below the calculated Tₘ of the hybrid under study. The Tₘ of a hybrid between a “BREAST CANCER GENE” polynucleotide having a nucleotide sequence of one of the sequences of the SEQ ID NO: 1 to 26 or 53 to 75 or the complement thereof and a polynucleotide sequence which is at least about 50, preferably about 75, 90, 96, or 98% identical to one of those nucleotide sequences can be calculated, for example, using the equation below [Bolton and McCarthy, 1962, (88):

Tₘ=81.5° C.−16.6(log₁₀[Na⁺])+0.41(% G+C)−0.63(% formamide)−600/l),
[0195] where l=the length of the hybrid in basepairs.

[0196] Stringent wash conditions include, for example, 4×SSC at 65° C., or 50% formamide, 4×SSC at 28° C., or 0.5×SSC, 0.1% SDS at 65° C. Highly stringent wash conditions include, for example, 0.2×SSC at 65° C.

[0197] The biological function of the identified genes may be more directly assessed by utilizing relevant in vivo and in vitro systems. In vivo systems may include, but are not limited to, animal systems which naturally exhibit breast cancer predisposition, or ones which have been engineered to exhibit such symptoms, including but not limited to the apoE-deficient malignant neoplasia mouse model [Plump et al., 1992, (89)].

[0198] Splice variants derived from the same genomic region, encoded by the same pre mRNA can be identified by hybridization conditions described above for homology search. The specific characteristics of variant proteins encoded by splice variants of the same pre transcript may differ and can also be assayed as disclosed. A “BREAST CANCER GENE” polynucleotide having a nucleotide sequence of one of the sequences of the SEQ ID NO: 1 to 26 or 53 to 75 or the complement thereof may therefor differ in parts of the entire sequence as presented for SEQ ID NO: 60 and the encoded splice variants SEQ ID NO: 61 to 66. These refer to individual proteins SEQ ID NO: 83 to 89. The prediction of splicing events and the identification of the utilized acceptor and donor sites within the pre mRNA can be computed (e.g. Software Package GRAIL or GenomeSCAN) and verified by PCR method by those with skill in the art.

### Antisense Oligonucleotides

[0199] Antisense oligonucleotides are nucleotide sequences which are complementary to a specific DNA or RNA sequence. Once introduced into a cell, the complementary nucleotides combine with natural sequences produced by the cell to form complexes and block either transcription or translation. Preferably, an antisense oligonucleotide is at least 6 nucleotides in length, but can be at least 7, 8, 10, 12, 15, 20, 25, 30, 35, 40, 45, or 50 or more nucleotides long. Longer sequences also can be used. Antisense oligonucleotide molecules can be provided in a DNA construct and introduced into a cell as described above to decrease the level of “BREAST CANCER GENE” gene products in the cell.

[0200] Antisense oligonucleotides can be deoxyribonucleotides, ribonucleotides, peptide nucleic acids (PNAs; described in U.S. Pat. No. 5,714,331), locked nucleic acids (LNAs; described in WO 99/12826), or a combination of them. Oligonucleotides can be synthesized manually or by an automated synthesizer, by covalently linking the 5′ end of one nucleotide with the 3′ end of another nucleotide with non-phosphodiester internucleotide linkages such alkylphosphonates, phosphorothioates, phosphorodithioates, alkylphosphonothioates, alkylphosphonates, phosphoramidates, phosphate esters, carbamates, acetamidate, carboxymethyl esters, carbonates, and phosphate triesters [Brown, 1994, (126); Sonveaux, 1994, (127) and Uhlmann et al., 1990, (128)].

[0201] Modifications of “BREAST CANCER GENE” expression can be obtained by designing antisense oligonucleotides which will form duplexes to the control, 5′, or regulatory regions of the “BREAST CANCER GENE”. Oligonucleotides derived from the transcription initiation site, e.g., between positions 10 and +10 from the start site, are preferred. Similarly, inhibition can be achieved using “triple helix” base-pairing methodology. Triple helix pairing is useful because it causes inhibition of the ability of the double helix to open sufficiently for the binding of polymerases, transcription factors, or chaperons. Therapeutic advances using triplex DNA have been described in the literature [Gee et al., 1994, (129)]. An antisense oligonucleotide also can be designed to block translation of mRNA by preventing the transcript from binding to ribosomes.

[0202] Precise complementarity is not required for successful complex formation between an antisense oligonucleotide and the complementary sequence of a “BREAST CANCER GENE” polynucleotide. Antisense oligonucleotides which comprise, for example, 2, 3, 4, or 5 or more stretches of contiguous nucleotides which are precisely complementary to a “BREAST CANCER GENE” polynucleotide, each separated by a stretch of contiguous nucleotides which are not complementary to adjacent “BREAST CANCER GENE” nucleotides, can provide sufficient targeting specificity for “BREAST CANCER GENE” mRNA. Preferably, each stretch of complementary contiguous nucleotides is at least 4, 5, 6, 7, or 8 or more nucleotides in length. Non-complementary intervening sequences are preferably 1, 2, 3, or 4 nucleotides in length. One skilled in the art can easily use the calculated melting point of an antisense-sense pair to determine the degree of mismatching which will be tolerated between a particular antisense oligonucleotide and a particular “BREAST CANCER GENE” polynucleotide sequence.

[0203] Antisense oligonucleotides can be modified without affecting their ability to hybridize to a “BREAST CANCER GENE” polynucleotide. These modifications can be internal or at one or both ends of the antisense molecule. For example, internucleoside phosphate linkages can be modified by adding cholesteryl or diamine moieties with varying numbers of carbon residues between the amino groups and terminal ribose. Modified bases and/or sugars, such as arabinose instead of ribose, or a 3′,5′ substituted oligonucleotide in which the 3′ hydroxyl group or the 5′ phosphate group are substituted, also can be employed in a modified antisense oligonucleotide. These modified oligonucleotides can be prepared by methods well known in the art [Agrawal et al., 1992, (130); Uhlmann et al., 1987, (131) and Uhlmann et al., (128)].

### Ribozymes

[0204] Ribozymes are RNA molecules with catalytic activity [Cech, 1987, (132); Cech, 1990, (133) and Couture & Stinchcomb, 1996, (134)]. Ribozymes can be used to inhibit gene function by cleaving an RNA sequence, as is known in the art (e.g., Haseloff et al., U.S. Pat. No. 5,641,673). The mechanism of ribozyme action involves sequence-specific hybridization of the ribozyme molecule to complementary target RNA, followed by endonucleolytic cleavage. Examples include engineered hammerhead motif ribozyme molecules that can specifically and efficiently catalyze endonucleolytic cleavage of specific nucleotide sequences.

[0205] The transcribed sequence of a “BREAST CANCER GENE” can be used to generate ribozymes which will specifically bind to mRNA transcribed from a “BREAST CANCER GENE” genomic locus. Methods of designing and constructing ribozymes which can cleave other RNA molecules in trans in a highly sequence specific manner have been developed and described in the art [Haseloff et al., 1988, (135)]. For example, the cleavage activity of ribozymes can be targeted to specific RNAs by engineering a discrete “hybridization” region into the ribozyme. The hybridization region contains a sequence complementary to the target RNA and thus specifically hybridizes with the target [see, for example, Gerlach et al., EP 0 321201].

[0206] Specific ribozyme cleavage sites within a “BREAST CANCER GENE” RNA target can be identified by scanning the target molecule for ribozyme cleavage sites which include the following sequences: GUA, GUU, and GUC. Once identified, short RNA sequences of between 15 and 20 ribonucleotides corresponding to the region of the target RNA containing the cleavage site can be evaluated for secondary structural features which may render the target inoperable. Suitability of candidate “BREAST CANCER GENE” RNA targets also can be evaluated by testing accessibility to hybridization with complementary oligonucleotides using ribonuclease protection assays. Longer complementary sequences can be used to increase the affinity of the hybridization sequence for the target. The hybridizing and cleavage regions of the ribozyme can be integrally related such that upon hybridizing to the target RNA through the complementary regions, the catalytic region of the ribozyme can cleave the target.

[0207] Ribozymes can be introduced into cells as part of a DNA construct. Mechanical methods, such as microinjection, liposome-mediated transfection, electroporation, or calcium phosphate precipitation, can be used to introduce a ribozyme-containing DNA construct into cells in which it is desired to decrease “BREAST CANCER GENE” expression. Alternatively, if it is desired that the cells stably retain the DNA construct, the construct can be supplied on a plasmid and maintained as a separate element or integrated into the genome of the cells, as is known in the art. A ribozyme-encoding DNA construct can include transcriptional regulatory elements, such as a promoter element, an enhancer or UAS element, and a transcriptional terminator signal, for controlling transcription of ribozymes in the cells.

[0208] As taught in Haseloff et al., U.S. Pat. No. 5,641,673, ribozymes can be engineered so that ribozyme expression will occur in response to factors which induce expression of a target gene. Ribozymes also can be engineered to provide an additional level of regulation, so that destruction of mRNA occurs only when both a nbozyme and a target gene are induced in the cells.

### Polypeptides

[0209] “BREAST CANCER GENE” polypeptides according to the invention comprise an polypeptide selected from SEQ ID NO: 27 to 52 and 76 to 98 or encoded by any of the polynucleotide sequences of the SEQ ID NO: 1 to 26 and 53 to 75 or derivatives, fragments, analogues and homologues thereof. A “BREAST CANCER GENE” polypeptide of the invention therefore can be a portion, a full-length, or a fusion protein comprising all or a portion of a “BREAST CANCER GENE” polypeptide.

### Protein Purification

[0210] “BREAST CANCER GENE” polypeptides can be purified from any cell which expresses the enzyme, including host cells which have been transfected with “BREAST CANCER GENE” expression constructs. Breast tissue is an especially useful source of “BREAST CANCER GENE” polypeptides. A purified “BREAST CANCER GENE” polypeptide is separated from other compounds which normally associate with the “BREAST CANCER GENE” polypeptide in the cell, such as certain proteins, carbohydrates, or lipids, using methods well-known in the art. Such methods include, but are not limited to, size exclusion chromatography, ammonium sulfate fractionation, ion exchange chromatography, affinity chromatography, and preparative gel electrophoresis. A preparation of purified “BREAST CANCER GENE” polypeptides is at least 80% pure; preferably, the preparations are 90%, 95%, or 99% pure. Purity of the preparations can be assessed by any means known in the art, such as SDS-polyacrylamide gel electrophoresis.

### Obtaining Polypeptides

[0211] “BREAST CANCER GENE” polypeptides can be obtained, for example, by purification from human cells, by expression of “BREAST CANCER GENE” polynucleotides, or by direct chemical synthesis.

### Biologically Active Variants

[0212] “BREAST CANCER GENE” polypeptide variants which are biologically active, i.e., retain an “BREAST CANCER GENE” activity, also are “BREAST CANCER GENE” polypeptides. Preferably, naturally or non-naturally occurring “BREAST CANCER GENE” polypeptide variants have amino acid sequences which are at least about 60, 65, or 70, preferably about 75, 80, 85, 90, 92, 94, 96, or 98% identical to the any of the amino acid sequences of the polypeptides of SEQ ID NO: 27 to 52 or 76 to 98 or the polypeptides encoded by any of the polynucleotides of SEQ ID NO: 1 to 26 or 53 to 75 or a fragment thereof. Percent identity between a putative “BREAST CANCER GENE” polypeptide variant and of the polypeptides of SEQ ID NO: 27 to 52 or 76 to 98 or the polypeptides encoded by any of the polynucleotides of SEQ ID NO: 1 to 26 or 53 to 75 or a fragment thereof is determined by conventional methods. [See, for example, Altschul et al., 1986, (90 and Henikoff & Henikoff, 1992, (91)]. Briefly, two amino acid sequences are aligned to optimize the alignment scores using a gap opening penalty of 10, a gap extension penalty of 1, and the “BLOSUM62” scoring matrix of Henikoff & Henikoff, (91).

[0213] Those skilled in the art appreciate that there are many established algorithms available to align two amino acid sequences. The “FASTA” similarity search algorithm of Pearson & Lipman is a suitable protein alignment method for examining the level of identity shared by an amino acid sequence disclosed herein and the amino acid sequence of a putative variant [Pearson & Lipman, 1988, (92), and Pearson, 1990, (93)]. Briefly, FASTA first characterizes sequence similarity by identifying regions shared by the query sequence (e.g., SEQ ID NO: 1 to 26 or 53 to 75) and a test sequence that have either the highest density of identities (if the ktup variable is 1) or pairs of identities (if ktup=2), without considering conservative amino acid substitutions, insertions, or deletions. The ten regions with the highest density of identities are then rescored by comparing the similarity of all paired amino acids using an amino acid substitution matrix, and the ends of the regions are “trimmed” to include only those residues that contribute to the highest score. If there are several regions with scores greater than the “cutoff” value (calculated by a predetermined formula based upon the length of the sequence the ktup value), then the trimmed initial regions are examined to determine whether the regions can be joined to form an approximate alignment with gaps. Finally, the highest scoring regions of the two amino acid sequences are aligned using a modification of the Needleman-Wunsch-Sellers algorithm [Needleman & Wunsch, 1970, (94), and Sellers, 1974, (95)], which allows for amino acid insertions and deletions. Preferred parameters for FASTA analysis are: ktup=1, gap opening penalty=10, gap extension penalty=1, and substitution matrix-BLOSUM62. These parameters can be introduced into a FASTA program by modifying the scoring matrix file (“SMATRIX”), as explained in Appendix 2 of Pearson, (93).

[0214] FASTA can also be used to determine the sequence identity of nucleic acid molecules using a ratio as disclosed above. For nucleotide sequence comparisons, the ktup value can range between one to six, preferably from three to six, most preferably three, with other parameters set as default.

[0215] Variations in percent identity can be due, for example, to amino acid substitutions, insertions, or deletions. Amino acid substitutions are defined as one for one amino acid replacements. They are conservative in nature when the substituted amino acid has similar structural and/or chemical properties. Examples of conservative replacements are substitution of a leucine with an isoleucine or valine, an aspartate with a glutamate, or a threonine with a serine.

[0216] Amino acid insertions or deletions are changes to or within an amino acid sequence. They typically fall in the range of about 1 to 5 amino acids. Guidance in determining which amino acid residues can be substituted, inserted, or deleted without abolishing biological or immunological activity of a “BREAST CANCER GENE” polypeptide can be found using computer programs well known in the art, such as DNASTAR software. Whether an amino acid change results in a biologically active “BREAST CANCER GENE” polypeptide can readily be determined by assaying for “BREAST CANCER GENE” activity, as described for example, in the specific Examples, below. Larger insertions or deletions can also be caused by alternative splicing. Protein domains can be inserted or deleted without altering the main activity of the protein.

### Fusion Proteins

[0217] Fusion proteins are useful for generating antibodies against “BREAST CANCER GENE” polypeptide amino acid sequences and for use in various assay systems. For example, fusion proteins can be used to identify proteins which interact with portions of a “BREAST CANCER GENE” polypeptide. Protein affinity chromatography or library-based assays for protein-protein interactions, such as the yeast two-hybrid or phage display systems, can be used for this purpose. Such methods are well known in the art and also can be used as drug screens.

[0218] A “BREAST CANCER GENE” polypeptide fusion protein comprises two polypeptide segments fused together by means of a peptide bond. The first polypeptide segment comprises at least 25, 50, 75, 100, 150, 200, 300, 400, 500, 600, 700 or 750 contiguous amino acids of an amino acid sequence encoded by any polynucleotide sequences of the SEQ D NO: 1 to 26 or 53 to 75 or of a biologically active variant, such as those described above. The first polypeptide segment also can comprise full-length “BREAST CANCER GENE”.

[0219] The second polypeptide segment can be a full-length protein or a protein fragment. Proteins commonly used in fusion protein construction include β-galactosidase, β-glucuronidase, green fluorescent protein (GFP), autofluorescent proteins, including blue fluorescent protein (BFP) glutathione-S-transferase (GST), luciferase, horseradish peroxidase (HRP), and chloramphenicol acetyltransferase (CAT). Additionally, epitope tags are used in fusion protein constructions, including histidine (His) tags, FLAG tags, influenza hemagglutinin (HA) tags, Myc tags, VSV-G tags, and thioredoxin (Trx) tags. Other fusion constructions can include maltose binding protein (MBP), S-tag, Lex a DNA binding domain (DBD) fusions, GAL4 DNA binding domain fusions, and herpes simplex virus (HSV) BP16 protein fusions. A fusion protein also can be engineered to contain a cleavage site located between the “BREAST CANCER GENE” polypeptide-encoding sequence and the heterologous protein sequence, so that the “BREAST CANCER GENE” polypeptide can be cleaved and purified away from the heterologous moiety.

[0220] A fusion protein can be synthesized chemically, as is known in the art. Preferably, a fusion protein is produced by covalently linking two polypeptide segments or by standard procedures in the art of molecular biology. Recombinant DNA methods can be used to prepare fusion proteins, for example, by making a DNA construct which comprises coding sequences selected from any of the polynucleotide sequences of the SEQ ID NO: 1 to 26 and 53 to 75 in proper reading frame with nucleotides encoding the second polypeptide segment and expressing the DNA construct in a host cell, as is known in the art. Many kits for constructing fusion proteins are available from companies such as Promega Corporation (Madison, Wis.), Stratagene (La Jolla, Calif.), CLONTECH (Mountain View, Calif.), Santa Cruz Biotechnology (Santa Cruz, Calif.), MBL International Corporation (MIC; Watertown, Mass.), and Quantum Biotechnologies (Montreal, Canada; 1-888-DNA-KITS).

[0221] Identification of Species Homologues

[0222] Species homologues of human a “BREAST CANCER GENE” polypeptide can be obtained using “BREAST CANCER GENE” polypeptide polynucleotides (described below) to make suitable probes or primers for screening cDNA expression libraries from other species, such as mice, monkeys, or yeast, identifying cDNAs which encode homologues of a “BREAST CANCER GENE” polypeptide, and expressing the cDNAs as is known in the art.

### Expression of Polynucleotides

[0223] To express a “BREAST CANCER GENE” polynucleotide, the polynucleotide can be inserted into an expression vector which contains the necessary elements for the transcription and translation of the inserted coding sequence. Methods which are well known to those skilled in the art can be used to construct expression vectors containing sequences encoding “BREAST CANCER GENE” polypeptides and appropriate transcriptional and translational control elements. These methods include in vitro recombinant DNA techniques, synthetic techniques, and in vivo genetic recombination. Such techniques are described, for example, in Sambrook et al., (77) and in Ausubel et al., (78).

[0224] A variety of expression vector/host systems can be utilized to contain and express sequences encoding a “BREAST CANCER GENE” polypeptide. These include, but are not limited to, microorganisms, such as bacteria transformed with recombinant bacteriophage, plasmid, or cosmid DNA expression vectors; yeast transformed with yeast expression vectors, insect cell systems infected with virus expression vectors (e.g., baculovirus), plant cell systems transformed with virus expression vectors (e.g., cauliflower mosaic virus, CaMV; tobacco mosaic virus, TMV) or with bacterial expression vectors (e.g., Ti or pBR322 plasmids), or animal cell systems.

[0225] The control elements or regulatory sequences are those regions of the vector enhancers, promoters, 5′ and 3′ untranslated regions which interact with host cellular proteins to carry out transcription and translation. Such elements can vary in their strength and specificity. Depending on the vector system and host utilized, any number of suitable transcription and translation elements, including constitutive and inducible promoters, can be used. For example, when cloning in bacterial systems, inducible promoters such as the hybrid lacZ promoter of the BLUESCRIPT phagemid (Stratagene, LaJolla, Calif.) or pSPORT1 plasmid (Life Technologies) and the like can be used. The baculovirus polyhedrin promoter can be used in insect cells. Promoters or enhancers derived from the genomes of plant cells (e.g., heat shock, RUBISCO, and storage protein genes) or from plant viruses (e.g., viral promoters or leader sequences) can be cloned into the vector. In mammalian cell systems, promoters from mammalian genes or from mammalian viruses are preferable. If it is necessary to generate a cell line that contains multiple copies of a nucleotide sequence encoding a “BREAST CANCER GENE” polypeptide, vectors based on SV40 or EBV can be used with an appropriate selectable marker.

### Bacterial and Yeast Expression Systems

[0226] In bacterial systems, a number of expression vectors can be selected depending upon the use intended for the “BREAST CANCER GENE” polypeptide. For example, when a large quantity of the “BREAST CANCER GENE” polypeptide is needed for the induction of antibodies, vectors which direct high level expression of fusion proteins that are readily purified can be used. Such vectors include, but are not limited to, multifunctional E. coli cloning and expression vectors such as BLUESCRIPT (Stratagene). In a BLUESCRIPT vector, a sequence encoding the “BREAST CANCER GENE” polypeptide can be ligated into the vector in frame with sequences for the amino terminal Met and the subsequent 7 residues of β-galactosidase so that a hybrid protein is produced. pIN vectors [Van Heeke & Schuster, (17)] or pGEX vectors (Promega, Madison, Wis.) also can be used to express foreign polypeptides as fusion proteins with glutathione S-transferase (GST). In general, such fusion proteins are soluble and can easily be purified from lysed cells by adsorption to glutathione agarose beads followed by elution in the presence of free glutathione. Proteins made in such systems can be designed to include heparin, thrombin, or factor Xa protease cleavage sites so that the cloned polypeptide of interest can be released from the GST moiety at will.

[0227] In the yeast Saccharomyces cerevisiae, a number of vectors containing constitutive or inducible promoters such as alpha factor, alcohol oxidase, and PGH can be used. For reviews, see Ausubel et al., (4) and Grant et al., (18).

### Plant and Insect Expression Systems

[0228] If plant expression vectors are used, the expression of sequences encoding “BREAST CANCER GENE” polypeptides can be driven by any of a number of promoters. For example, viral promoters such as the 35S and 19S promoters of CaMV can be used alone or in combination with the omega leader sequence from TMV [Takamatsu, 1987, (96)]. Alternatively, plant promoters such as the small subunit of RUBISCO or heat shock promoters can be used [Coruzzi et al., 1984, (97); Broglie et al., 1984, (98); Winter et al., 1991, (99)]. These constructs can be introduced into plant cells by direct DNA transformation or by pathogen-mediated transfection. Such techniques are described in a number of generally available reviews.

[0229] An insect system also can be used to express a “BREAST CANCER GENE” polypeptide. For example, in one such system Autographa californica nuclear polyhedrosis virus (AcNPV) is used as a vector to express foreign genes in Spodoptera frugiperda cells or in Trichoplusia larvae. Sequences encoding “BREAST CANCER GENE” polypeptides can be cloned into a nonessential region of the virus, such as the polyhedrin gene, and placed under control of the polyhedrin promoter. Successful insertion of “BREAST CANCER GENE” polypeptides will render the polyhedrin gene inactive and produce recombinant virus lacking coat protein. The recombinant viruses can then be used to infect S. frugiperda cells or Trichoplusia larvae in which “BREAST CANCER GENE” polypeptides can be expressed [Engelhard et al., 1994, (100)].

### Mammalian Expression Systems

[0230] A number of viral-based expression systems can be used to express “BREAST CANCER GENE” polypeptides in mammalian host cells. For example, if an adenovirus is used as an expression vector, sequences encoding “BREAST CANCER GENE” polypeptides can be ligated into an adenovirus transcription/translation complex comprising the late promoter and tripartite leader sequence. Insertion in a nonessential E1 or E3 region of the viral genome can be used to obtain a viable virus which is capable of expressing a “BREAST CANCER GENE” polypeptide in infected host cells [Logan & Shenk, 1984, (101)]. If desired, transcription enhancers, such as the Rous sarcoma virus (RSV) enhancer, can be used to increase expression in mammalian host cells.

[0231] Human artificial chromosomes (HACs) also can be used to deliver larger fragments of DNA than can be contained and expressed in a plasmid. HACs of 6M to 10M are constructed and delivered to cells via conventional delivery methods (e.g., liposomes, polycationic amino polymers, or vesicles).

[0232] Specific initiation signals also can be used to achieve more efficient translation of sequences encoding “BREAST CANCER GENE” polypeptides. Such signals include the ATG initiation codon and adjacent sequences. In cases where sequences encoding a “BREAST CANCER GENE” polypeptide, its initiation codon, and upstream sequences are inserted into the appropriate expression vector, no additional transcriptional or translational control signals may be needed. However, in cases where only coding sequence, or a fragment thereof, is inserted, exogenous translational control signals (including the ATG initiation codon) should be provided. The initiation codon should be in the correct reading frame to ensure translation of the entire insert. Exogenous translational elements and initiation codons can be of various origins, both natural and synthetic. The efficiency of expression can be enhanced by the inclusion of enhancers which are appropriate for the particular cell system which is used [Scharf et al., 1994, (102)].

### Host Cells

[0233] A host cell strain can be chosen for its ability to modulate the expression of the inserted sequences or to process the expressed “BREAST CANCER GENE” polypeptide in the desired fashion. Such modifications of the polypeptide include, but are not limited to, acetylation, carboxylation, glycosylation, phosphorylation, lipidation, and acylation. Posttranslational processing which cleaves a “prepro” form of the polypeptide also can be used to facilitate correct insertion, folding and/or function. Different host cells which have specific cellular machinery and characteristic mechanisms for Post-translational activities (e.g., CHO, HeLa, MDCK, HEK293, and WI38), are available from the American Type Culture Collection (ATCC; 10801 University Boulevard, Manassas, Va. 20110-2209) and can be chosen to ensure the correct modification and processing of the foreign protein.

[0234] Stable expression is preferred for long-term, high-yield production of recombinant proteins. For example, cell lines which stably express “BREAST CANCER GENE” polypeptides can be transformed using expression vectors which can contain viral origins of replication and/or endogenous expression elements and a selectable marker gene on the same or on a separate vector. Following the introduction of the vector, cells can be allowed to grow for 12 days in an enriched medium before they are switched to a selective medium. The purpose of the selectable marker is to confer resistance to selection, and its presence allows growth and recovery of cells which successfully express the introduced “BREAST CANCER GENE” sequences. Resistant clones of stably transformed cells can be proliferated using tissue culture techniques appropriate to the cell type [Freshney et al., 1986, (103).

[0235] Any number of selection systems can be used to recover transformed cell lines. These include, but are not limited to, the herpes simplex virus thymidine kinase (Wigler et al., 1977, (104)] and adenine phosphoribosyltransferase [Lowy et al., 1980, (105)] genes which can be employed in tk⁻ or aprt⁻ cells, respectively. Also, antimetabolite, antibiotic, or herbicide resistance can be used as the basis for selection. For example, dhfr confers resistance to methotrexate [Wigler et al., 1980, (106)], npt confers resistance to the aminoglycosides, neomycin and G418 [Colbere-Garapin et al., 1981, (107)], and als and pat confer resistance to chlorsulfuron and phosphinotricin acetyltransferase, respectively. Additional selectable genes have been described. For example, trpB allows cells to utilize indole in place of tryptophan, or hisD, which allows cells to utilize histinol in place of histidine [Hartman & Mulligan, 1988, (108)]. Visible markers such as anthocyanins, β-glucuronidase and its substrate GUS, and luciferase and its substrate luciferin, can be used to identify transformants and to quantify the amount of transient or stable protein expression attributable to a specific vector system [Rhodes et al., 1995, (109)].

### Detecting Expression and Gene Product

[0236] Although the presence of marker gene expression suggests that the “BREAST CANCER GENE” polynucleotide is also present, its presence and expression may need to be confirmed. For example, if a sequence encoding a “BREAST CANCER GENE” polypeptide is inserted within a marker gene sequence, transformed cells containing sequences which encode a “BREAST CANCER GENE” polypeptide can be identified by the absence of marker gene function. Alternatively, a marker gene can be placed in tandem with a sequence encoding a “BREAST CANCER GENE” polypeptide under the control of a single promoter. Expression of the marker gene in response to induction or selection usually indicates expression of the “BREAST CANCER GENE” polynucleotide.

[0237] Alternatively, host cells which contain a “BREAST CANCER GENE” polynucleotide and which express a “BREAST CANCER GENE” polypeptide can be identified by a variety of procedures known to those of skill in the art. These procedures include, but are not limited to, DNA-DNA or DNA-RNA hybridization and protein bioassay or immunoassay techniques which include membrane, solution, or chip-based technologies for the detection and/or quantification of polynucleotide or protein. For example, the presence of a polynucleotide sequence encoding a “BREAST CANCER GENE” polypeptide can be detected by DNA-DNA or DNA-RNA hybridization or amplification using probes or fragments or fragments of polynucleotides encoding a “BREAST CANCER GENE” polypeptide. Nucleic acid amplification-based assays involve the use of oligonucleotides selected from sequences encoding a “BREAST CANCER GENE” polypeptide to detect transformants which contain a “BREAST CANCER GENE” polynucleotide.

[0238] A variety of protocols for detecting and measuring the expression of a “BREAST CANCER GENE” polypeptide, using either polyclonal or monoclonal antibodies specific for the polypeptide, are known in the art. Examples include enzyme-linked immunosorbent assay (ELISA), radioimmunoassay (RIA), and fluorescence activated cell sorting (FACS). A two-site, monoclonal-based immunoassay using monoclonal antibodies reactive to two non-interfering epitopes on a “BREAST CANCER GENE” polypeptide can be used, or a competitive binding assay can be employed. These and other assays are described in Hampton et al., (110) and Maddox et al., 111).

[0239] A wide variety of labels and conjugation techniques are known by those skilled in the art and can be used in various nucleic acid and amino acid assays. Means for producing labeled hybridization or PCR probes for detecting sequences related to polynucleotides encoding “BREAST CANCER GENE” polypeptides include oligo labeling, nick translation, end-labeling, or PCR amplification using a labeled nucleotide. Alternatively, sequences encoding a “BREAST CANCER GENE” polypeptide can be cloned into a vector for the production of an mRNA probe. Such vectors are known in the art, are commercially available, and can be used to synthesize RNA probes in vitro by addition of labeled nucleotides and an appropriate RNA polymerase such as T7, T3, or SP6. These procedures can be conducted using a variety of commercially available kits (Amersham Pharmacia Biotech, Promega, and US Biochemical). Suitable reporter molecules or labels which can be used for ease of detection include radionuclides, enzymes, and fluorescent, chemiluminescent, or chromogenic agents, as well as substrates, cofactors, inhibitors, magnetic particles, and the like.

### Expression and Purification of Polypeptides

[0240] Host cells transformed with nucleotide sequences encoding a “BREAST CANCER GENE” polypeptide can be cultured under conditions suitable for the expression and recovery of the protein from cell culture. The polypeptide produced by a transformed cell can be secreted or stored intracelluar depending on the sequence and/or the vector used. As will be understood by those of skill in the art, expression vectors containing polynucleotides which encode “BREAST CANCER GENE” polypeptides can be designed to contain signal sequences which direct secretion of soluble “BREAST CANCER GENE” polypeptides through a prokaryotic or eukaryotic cell membrane or which direct the membrane insertion of membrane-bound “BREAST CANCER GENE” polypeptide.

[0241] As discussed above, other constructions can be used to join a sequence encoding a “BREAST CANCER GENE” polypeptide to a nucleotide sequence encoding a polypeptide domain which will facilitate purification of soluble proteins. Such purification facilitating domains include, but are not limited to, metal chelating peptides such as histidine-tryptophan modules that allow purification on immobilized metals, protein A domains that allow purification on immobilized immunoglobulin, and the domain utilized in the FLAGS extension/affinity purification system Immunex Corp., Seattle, Wash.). Inclusion of cleavable linker sequences such as those specific for Factor Xa or enterokinase (Invitrogen, San Diego, Calif.) between the purification domain and the “BREAST CANCER GENE” polypeptide also can be used to facilitate purification. One such expression vector provides for expression of a fusion protein containing a “BREAST CANCER GENE” polypeptide and 6 histidine residues preceding a thioredoxin or an enterokinase cleavage site. The histidine residues facilitate purification by IMAC (immobilized metal ion affinity chromatography [Porath et al., 1992, (112)], while the enterokinase cleavage site provides a means for purifying the “BREAST CANCER GENE” polypeptide from the fusion protein. Vectors which contain fusion proteins are disclosed in Kroll et al., (113).

### Chemical Synthesis

[0242] Sequences encoding a “BREAST CANCER GENE” polypeptide can be synthesized, in whole or in part, using chemical methods well known in the art (see Caruthers et al., (114) and Hom et al., (115). Alternatively, a “BREAST CANCER GENE” polypeptide itself can be produced using chemical methods to synthesize its amino acid sequence, such as by direct peptide synthesis using solid-phase techniques [Merrifield, 1963, (116) and Roberge et al., 1995, (117)]. Protein synthesis can be performed using manual techniques or by automation. Automated synthesis can be achieved, for example, using Applied Biosystems 431A Peptide Synthesizer (Perkin Elner). Optionally, fragments of “BREAST CANCER GENE” polypeptides can be separately synthesized and combined using chemical methods to produce a full-length molecule.

[0243] The newly synthesized peptide can be substantially purified by preparative high performance liquid chromatography [Creighton, 1983, (118)]. The composition of a synthetic “BREAST CANCER GENE” polypeptide can be confirmed by amino acid analysis or sequencing (e.g., the Edrnan degradation procedure; see Creighton, (118). Additionally, any portion of the amino acid sequence of the “BREAST CANCER GENE” polypeptide can be altered during direct synthesis and/or combined using chemical methods with sequences from other proteins to produce a variant polypeptide or a fusion protein.

### Production of Altered Polypeptides

[0244] As will be understood by those of skill in the art, it may be advantageous to produce “BREAST CANCER GENE” polypeptide-encoding nucleotide sequences possessing non-natural occurring codons. For example, codons preferred by a particular prokaryotic or eukaryotic host can be selected to increase the rate of protein expression or to produce an RNA transcript having desirable properties, such as a half-life which is longer than that of a transcript generated from the naturally occurring sequence.

[0245] The nucleotide sequences disclosed herein can be engineered using methods generally known in the art to alter “BREAST CANCER GENE” polypeptide-encoding sequences for a variety of reasons, including but not limited to, alterations which modify the cloning, processing, and/or expression of the polypeptide or mRNA product. DNA shuffling by random fragmentation and PCR re-assembly of gene fragments and synthetic oligonucleotides can be used to engineer the nucleotide sequences. For example, site-directed mutagenesis can be used to insert new restriction sites, alter glycosylation patterns, change codon preference, produce splice variants, introduce mutations, and so forth.

### Predictive, Diagnostic and Prognostic Assays

[0246] The present invention provides method for determining whether a subject is at risk for developing malignant neoplasia and breast cancer in particular by detecting one of the disclosed polynucleotide markers comprising any of the polynucleotides sequences of the SEQ ID NO: 2 to 6, 8, 9, 11 to 16, 18, 19 or 21 to 26 or 53 to 75 and/or the polypeptide markers encoded thereby or polypeptide markers comprising any of the polypeptide sequences of the SEQ ID NO: 28 to 32, 34, 35, 37 to 42, 44, 45 or 47 to 52 or 76 to 98 or at least 2 of the disclosed polynucleotides selected from SEQ ID NO: 1 to 26 and 53 to 75 or the at least 2 of the disclosed polypeptides selected from SEQ ID NO: 28 to 32 and 76 to 98 for malignant neoplasia and breast cancer in particular.

[0247] In clinical applications, biological samples can be screened for the presence and/or absence of the biomarkers identified herein. Such samples are for example needle biopsy cores, surgical resection samples, or body fluids like serum, thin needle nipple aspirates and urine. For example, these methods include obtaining a biopsy, which is optionally fractionated by cryostat sectioning to enrich diseases cells to about 80% of the total cell population. In certain embodiments, polynucleotides extracted from these samples may be amplified using techniques well known in the art. The expression levels of selected markers detected would be compared with statistically valid groups of diseased and healthy samples.

[0248] In one embodiment the diagnostic method comprises determining whether a subject has an abnormal mRNA and/or protein level of the disclosed markers, such as by Northern blot analysis, reverse transcription-polymerase chain reaction (RT-PCR), in situ hybridization, immunoprecipitation, Western blot hybridization, or immunohistochemistry. According to the method, cells are obtained from a subject and the levels of the disclosed biomarkers, protein or mRNA level, is determined and compared to the level of these markers in a healthy subject. An abnormal level of the biomarker polypeptide or mRNA levels is likely to be indicative of malignant neoplasia such as breast cancer.

[0249] In another embodiment the diagnostic method comprises determining whether a subject has an abnormal DNA content of said genes or said genomic loci, such as by Southern blot analysis, dot blot analysis, fluorescence or colorimetric In Situ hybridization, comparative genomic hybridization, genotpying by VNTR, STS-PCR or quantitative PCR. In general these assays comprise the usage of probes from representative genomic regions. The probes contain at least parts of said genomic regions or sequences complementary or analogous to said regions. In particular intra- or intergenic regions of said genes or genomic regions. The probes can consist of nucleotide sequences or sequences of analogous functions (e.g. PNAs, Morpholino oligomers) being able to bind to target regions by hybridization. In general genomic regions being altered in said patient samples are compared with unaffected control samples (normal tissue from the same or different patients, surrounding unaffected tissue, peripheral blood) or with genomic regions of the same sample that don't have said alterations and can therefore serve as internal controls. In a preferred embodiment regions located on the same chromosome are used. Alternatively, gonosomal regions and/or regions with defined varying amount in the sample are used. In one favored embodiment the DNA content, structure, composition or modification is compared that lie within distinct genomic regions. Especially favored are methods that detect the DNA content of said samples, where the amount of target regions are altered by amplification and or deletions. In another embodiment the target regions are analyzed for the presence of polymorphisms (e.g. Single Nucleotide Polymorphisms or mutations) that affect or predispose the cells in said samples with regard to clinical aspects, being of diagnostic, prognostic or therapeutic value. Preferably, the identification of sequence variations is used to define haplotypes that result in characteristic behavior of said samples with said clinical aspects.

[0250] The following examples of genes in 17q12-21.2 are offered by way of illustration, not by way of limitation.

[0251] One embodiment of the invention is a method for the prediction, diagnosis or prognosis of malignant neoplasia by the detection of at least 10, at least 5, or at least 4, or at least 3 and more preferably at least 2 markers whereby the markers are genes and fragments thereof and/or genomic nucleic acid sequences that are located on one chromosomal region which is altered in malignant neoplasia.

[0252] One further embodiment of the invention is method for the prediction, diagnosis or prognosis of malignant neoplasia by the detection of at least 10, at least 5, or at least 4, or at least 3 and more preferably at least 2 markers whereby the markers (a) are genes and fragments thereof and/or genomic nucleic acid sequences that are located on one or more chromosomal region(s) which is/are altered in malignant neoplasia and (b) functionally interact as (i) receptor and ligand or (ii) members of the same signal transduction pathway or (iii) members of synergistic signal transduction pathways or (iv) members of antagonistic signal transduction pathways or (v) transcription factor and transcription factor binding site.

[0253] In one embodiment, the method for the prediction, diagnosis or prognosis of malignant neoplasia and breast cancer in particular is done by the detection of:
[0254] (a) polynucleotide selected from the polynucleotides of the SEQ D NO: 2 to 6, 8, 9, 11 to 16, 18, 19, 21 to 26 or 53 to 75;
[0255] (b) a polynucleotide which hybridizes under stringent conditions to a polynucleotide specified in (a) encoding a polypeptide exhibiting the same biological function as specified for the respective sequence in Table 2 or 3;
[0256] (c) a polynucleotide the sequence of which deviates from the polynucleotide specified in (a) and (b) due to the generation of the genetic code encoding a polypeptide exhibiting the same biological function as specified for the respective sequence in Table 2 or 3;
[0257] (d) a polynucleotide which represents a specific fragment, derivative or allelic variation of a polynucleotide sequence specified in (a) to (c);
   in a biological sample comprising the following steps: hybridizing any polynucleotide or analogous oligomer specified in (a) to (do) to a polynucleotide material of a biological sample, thereby forming a hybridization complex; and detecting said hybridization complex.

[0258] In another embodiment the method for the prediction, diagnosis or prognosis of malignant neoplasia is done as just described but, wherein before hybridization, the polynucleotide material of the biological sample is amplified.

[0259] In another embodiment the method for the diagnosis or prognosis of malignant neoplasia and breast cancer in particular is done by the detection of:
[0260] (a) a polynucleotide selected from the polynucleotides of the SEQ ID NO: 2 to 6, 8, 9, 11 to 16, 18, 19, 21 to 26 or 53 to 75;
[0261] (b) a polynucleotide which hybridizes under stringent conditions to a polynucleotide specified in (a) encoding a polypeptide exhibiting the same biological function as specified for the respective sequence in Table 2 or 3;
[0262] (c) a polynucleotide the sequence of which deviates from the polynucleotide specified in (a) and (b) due to the generation of the genetic code encoding a polypeptide exhibiting the same biological function as specified for the respective sequence in Table 2 or 3;
[0263] (d) a polynucleotide which represents a specific fragment, derivative or allelic variation of a polynucleotide sequence specified in (a) to (c);
[0264] (e) a polypeptide encoded by a polynucleotide sequence specified in (a) to (d)
[0265] (f) a polypeptide comprising any polypeptide of SEQ ID NO: 28 to 32, 34, 35, 37 to 42, 44, 45, 47 to 52 or 76 to 98;
   comprising the steps of contacting a biological sample with a reagent which specifically interacts with the polynucleotide specified in (a) to (d) or the polypeptide specified in (e).

### DNA Array Technology

[0266] In one embodiment, the present Invention also provides a method wherein polynucleotide probes are immobilized an a DNA chip in an organized array. Oligonucleotides can be bound to a solid Support by a variety of processes, including lithography. For example a chip can hold up to 4100,00 oligonucleotides (GeneChip, Affymetrix). The present invention provides significant advantages over the available tests for malignant neoplasia, such as breast cancer, because it increases the reliability of the test by providing an array of polynucleotide markers an a single chip.

[0267] The method includes obtaining a biopsy of an affected person, which is optionally fractionated by cryostat sectioning to enrich diseased cells to about 80% of the total cell population and the use of body fluids such as serum or urine, serum or cell containing liquids (e.g. derived from fine needle aspirates). The DNA or RNA is then extracted, amplified, and analyzed with a DNA chip to determine the presence of absence of the marker polynucleotide sequences. In one embodiment, the polynucleotide probes are spotted onto a substrate in a two-dimensional matrix or array. samples of polynucleotides can be labeled and then hybridized to the probes. Double-stranded polynucleotides, comprising the labeled sample polynucleotides bound to probe polynucleotides, can be detected once the unbound portion of the sample is washed away.

[0268] The probe polynucleotides can be spotted an substrates including glass, nitrocellulose, etc. The probes can be bound to the Substrate by either covalent bonds or by non-specific interactions, such as hydrophobic interactions. The sample polynucleotides can be labeled using radioactive labels, fluorophores, chromophores, etc. Techniques for constructing arrays and methods of using these arrays are described in EP 0 799 897; WO 97/29212; WO 97/27317; EP 0 785 280; WO 97/02357; U.S. Pat. No. 5,593,839; U.S. Pat. No. 5,578,832; EP 0 728 520; U.S. Pat. No. 5,599,695; EP 0 721 016; U.S. Pat. No. 5,556,752; WO 95/22058; and U.S. Pat. No. 5,631,734. Further, arrays can be used to examine differential expression of genes and can be used to determine gene function. For example, arrays of the instant polynucleotide sequences can be used to determine if any of the polynucleotide sequences are differentially expressed between normal cells and diseased cells, for example. High expression of a particular message in a diseased sample, which is not observed in a corresponding normal sample, can indicate a breast cancer specific protein.

[0269] Accordingly, in one aspect, the invention provides probes and primers that are specific to the unique polynucleotide markers disclosed herein.

[0270] In one embodiment, the method comprises using a polynucleotide probe to determine the presence of malignant or breast cancer cells in particular in a tissue from a patient. Specifically, the method comprises:
[0271] 1) providing a polynucleotide probe comprising a nucleotide sequence at least 12 nucleotides in length, preferably at least 15 nucleotides, more preferably, 25 nucleotides, and most preferably at least 40 nucleotides, and up to all or nearly all of the coding sequence which is complementary to a portion of the coding sequence of a polynucleotide selected from the polynucleotides of SEQ ID NO: 1 to 26 and 53 to 75 or a sequence complementary thereto and is
[0272] 2) differentially expressed in malignant neoplasia, such as breast cancer;
[0273] 3) obtaining a tissue sample from a patient with malignant neoplasia;
[0274] 4) providing a second tissue sample from a patient with no malignant neoplasia;
[0275] 5) contacting the polynucleotide probe under stringent conditions with RNA of each of said first and second tissue samples (e.g., in a Northern blot or in situ hybridization assay); and
[0276] 6) comparing (a) the amount of hybridization of the probe with RNA of the first tissue sample, with (b) the amount of hybridization of the probe with RNA of the second tissue sample;
   wherein a statistically significant difference in the amount of hybridization with the RNA of the first tissue sample as compared to the amount of hybridization with the RNA of the second tissue sample is indicative of malignant neoplasia and breast cancer in particular in the first tissue sample.

### Data Analysis Methods

[0277] Comparison of the expression levels of one or more “BREAST CANCER GENES” with reference expression levels, e.g., expression levels in diseased cells of breast cancer or in normal counterpart cells, is preferably conducted using computer systems. In one embodiment, expression levels are obtained in two cells and these two sets of expression levels are introduced into a computer system for comparison. In a preferred embodiment, one set of expression levels is entered into a computer system for comparison with values that are already present in the computer system, or in computer-readable form that is then entered into the computer system.

[0278] In one embodiment, the invention provides a computer readable form of the gene expression profile data of the invention, or of values corresponding to the level of expression of at least one “BREAST CANCER GENE” in a diseased cell. The values can be mRNA expression levels obtained from experiments, e.g., microarray analysis. The values can also be mRNA levels normalised relative to a reference gene whose expression is constant in numerous cells under numerous conditions, e.g., GAPDH. In other embodiments, the values in the computer are ratios of, or differences between, normalized or non-normalized mRNA levels in different samples.

[0279] The gene expression profile data can be in the form of a table, such as an Excel table. The data can be alone, or it can be part of a larger database, e.g., comprising other expression profiles. For example, the expression profile data of the invention can be part of a public database. The computer readable form can be in a computer. In another embodiment, the invention provides a computer displaying the gene expression profile data.

[0280] In one embodiment, the invention provides a method for determining the similarity between the level of expression of one or more “BREAST CANCER GENES” in a first cell, e.g., a cell of a subject, and that in a second cell, comprising obtaining the level of expression of one or more “BREAST CANCER GENES” in a first cell and entering these values into a computer comprising a database including records comprising values corresponding to levels of expression of one or more “BREAST CANCER GENES” in a second cell, and processor instructions, e.g., a user interface, capable of receiving a selection of one or more values for comparison purposes with data that is stored in the computer. The computer may further comprise a means for converting the comparison data into a diagram or chart or other type of output.

[0281] In another embodiment, values representing expression levels of “BREAST CANCER GENES” are entered into a computer system, comprising one or more databases with reference expression levels obtained from more than one cell. For example, the computer comprises expression data of diseased and normal cells. Instructions are provided to the computer, and the computer is capable of comparing the data entered with the data in the computer to determine whether the data entered is more similar to that of a normal cell or of a diseased cell.

[0282] In another embodiment, the computer comprises values of expression levels in cells of subjects at different stages of breast cancer, and the computer is capable of comparing expression data entered into the computer with the data stored, and produce results indicating to which of the expression profiles in the computer, the one entered is most similar, such as to determine the stage of breast cancer in the subject.

[0283] In yet another embodiment, the reference expression profiles in the computer are expression profiles from cells of breast cancer of one or more subjects, which cells are treated in vivo or in vitro with a drug used for therapy of breast cancer. Upon entering of expression data of a cell of a subject treated in vitro or in vivo with the drug, the computer is instructed to compare the data entered to the data in the computer, and to provide results indicating whether the expression data input into the computer are more similar to those of a cell of a subject that is responsive to the drug or more similar to those of a cell of a subject that is not responsive to the drug. Thus, the results indicate whether the subject is likely to respond to the treatment with the drug or unlikely to respond to it.

[0284] In one embodiment, the invention provides a system that comprises a means for receiving gene expression data for one or a plurality of genes; a means for comparing the gene expression data from each of said one or plurality of genes to a common reference frame; and a means for presenting the results of the comparison. This system may further comprise a means for clustering the data.

[0285] In another embodiment, the invention provides a computer program for analyzing gene expression data comprising (i) a computer code that receives as input gene expression data for a plurality of genes and (ii) a computer code that compares said gene expression data from each of said plurality of genes to a common reference frame.

[0286] The invention also provides a machine-readable or computer-readable medium including program instructions for performing the following steps: (i) comparing a plurality of values corresponding to expression levels of one or more genes characteristic of breast cancer in a query cell with a database including records comprising reference expression or expression profile data of one or more reference cells and an annotation of the type of cell; and (ii) indicating to which cell the query cell is most similar based on similarities of expression profiles. The reference cells can be cells from subjects at different stages of breast cancer. The reference cells can also be cells from subjects responding or not responding to a particular drug treatment and optionally incubated in vitro or in vivo with the drug.

[0287] The reference cells may also be cells from subjects responding or not responding to several different treatments, and the computer system indicates a preferred treatment for the subject. Accordingly, the invention provides a method for selecting a therapy for a patient having breast cancer, the method comprising: (i) providing the level of expression of one or more genes characteristic of breast cancer in a diseased cell of the patient; (ii) providing a plurality of reference profiles, each associated with a therapy, wherein the subject expression profile and each reference profile has a plurality of values, each value representing the level of expression of a gene characteristic of breast cancer; and (iii) selecting the reference profile most similar to the subject expression profile, to thereby select a therapy for said patient. In a preferred embodiment step (iii) is performed by a computer. The most similar reference profile may be selected by weighing a comparison value of the plurality using a weight value associated with the corresponding expression data.

[0288] The relative abundance of an mRNA in two biological samples can be scored as a perturbation and its magnitude determined (i.e., the abundance is different in the two sources of mRNA tested), or as not perturbed (i.e., the relative abundance is the same). In various embodiments, a difference between the two sources of RNA of at least a factor of about 25% (RNA from one source is 25% more abundant in one source than the other source), more usually about 50%, even more often by a factor of about 2 (twice as abundant), 3 (three times as abundant) or 5 (five times as abundant) is scored as a perturbation. Perturbations can be used by a computer for calculating and expression comparisons.

[0289] Preferably, in addition to identifying a perturbation as positive or negative, it is advantageous to determine the magnitude of the perturbation. This can be carried out, as noted above, by calculating the ratio of the emission of the two fluorophores used for differential labeling, or by analogous methods that will be readily apparent to those of skill in the art.

[0290] The computer readable medium may further comprise a pointer to a descriptor of a stage of breast cancer or to a treatment for breast cancer.

[0291] In operation, the means for receiving gene expression data, the means for comparing the gene expression data, the means for presenting, the means for normalizing, and the means for clustering within the context of the systems of the present invention can involve a programmed computer with the respective functionalities described herein, implemented in hardware or hardware and software; a logic circuit or other component of a programmed computer that performs the operations specifically identified herein, dictated by a computer program; or a computer memory encoded with executable instructions representing a computer program that can cause a computer to function in the particular fashion described herein.

[0292] Those skilled in the art will understand that the systems and methods of the present invention may be applied to a variety of systems, including IBM-compatible personal computers running MS-DOS or Microsoft Windows.

[0293] The computer may have internal components linked to external components. The internal components may include a processor element interconnected with a main memory. The computer system can be an Intel Pentium®-based processor of 200 MHz or greater clock rate and with 32 MB or more of main memory. The external component may comprise a mass storage, which can be one or more hard disks (which are typically packaged together with the processor and memory). Such hard disks are typically of 1 GB or greater storage capacity. Other external components include a user interface device, which can be a monitor, together with an inputting device, which can be a “mouse”, or other graphic input devices, and/or a keyboard. A printing device can also be attached to the computer.

[0294] Typically, the computer system is also linked to a network link, which can be part of an Ethernet link to other local computer systems, remote computer systems, or wide area communication networks, such as the Internet. This network link allows the computer system to share data and processing tasks with other computer systems.

[0295] Loaded into memory during operation of this system are several software components, which are both standard in the art and special to the instant invention. These software components collectively cause the computer system to function according to the methods of this invention. These software components are typically stored on a mass storage. A software component represents the operating system, which is responsible for managing the computer system and its network interconnections. This operating system can be, for example, of the Microsoft Windows' family, such as Windows 95, Windows 98, or Windows NT. A software component represents common languages and functions conveniently present on this system to assist programs implementing the methods specific to this invention. Many high or low level computer languages can be used to program the analytic methods of this invention. Instructions can be interpreted during run-time or compiled. Preferred languages include C/C++, and JAVA®. Most preferably, the methods of this invention are programmed in mathematical software packages which allow symbolic entry of equations and high-level specification of processing, including algorithms to be used, thereby freeing a user of the need to procedurally program individual equations or algorithms. Such packages include Matlab from Mathworks (Natick, Mass.), Mathematica from Wolfram Research (Champaign, Ill.), or S-Plus from Math Soft (Cambridge, Mass.). Accordingly, a software component represents the analytic methods of this invention as programmed in a procedural language or symbolic package. In a preferred embodiment, the computer system also contains a database comprising values representing levels of expression of one or more genes characteristic of breast cancer. The database may contain one or more expression profiles of genes characteristic of breast cancer in different cells.

[0296] In an exemplary implementation, to practice the methods of the present invention, a user first loads expression profile data into the computer system. These data can be directly entered by the user from a monitor and keyboard, or from other computer systems linked by a network connection, or on removable storage media such as a CD-ROM or floppy disk or through the network. Next the user causes execution of expression profile analysis software which performs the steps of comparing and, e.g., clustering co-varying genes into groups of genes.

[0297] In another exemplary implementation, expression profiles are compared using a method described in U.S. Pat. No. 6,203,987. A user first loads expression profile data into the computer system. Geneset profile definitions are loaded into the memory from the storage media or from a remote computer, preferably from a dynamic gene set database system, through the network. Next the user causes execution of projection software which performs the steps of converting expression profile to projected expression profiles. The projected expression profiles are then displayed.

[0298] In yet another exemplary implementation, a user first leads a projected profile into the memory. The user then causes the loading of a reference profile into the memory. Next, the user causes the execution of comparison software which performs the steps of objectively comparing the profiles.

### Detection of Variant Polynucleotide Sequence

[0299] In yet another embodiment, the invention provides methods for determining whether a subject is at risk for developing a disease, such as a predisposition to develop malignant neoplasia, for example breast cancer, associated with an aberrant activity of any one of the polypeptides encoded by any of the polynucleotides of the SEQ ID NO: 1 to 26 or 53 to 75, wherein the aberrant activity of the polypeptide is characterized by detecting the presence or absence of a genetic lesion characterized by at least one of these:
[0300] (i) an alteration affecting the integrity of a gene encoding a marker polypeptides, or
[0301] (ii) the misexpression of the encoding polynucleotide.

[0302] To illustrate, such genetic lesions can be detected by ascertaining the existence of at least one of these:
[0303] I. a deletion of one or more nucleotides from the polynucleotide sequence
[0304] II. an addition of one or more nucleotides to the polynucleotide sequence
[0305] III. a substitution of one or more nucleotides of the polynucleotide sequence
[0306] IV. a gross chromosomal rearrangement of the polynucleotide sequence
[0307] V. a gross alteration in the level of a messenger RNA transcript of the polynucleotide sequence
[0308] VI. aberrant modification of the polynucleotide sequence, such as of the methylation pattern of the genomic DNA
[0309] VII. the presence of a non-wild type splicing pattern of a messenger RNA transcript of the gene
[0310] VIII. a non-wild type level of the marker polypeptide
[0311] IX. allelic loss of the gene
[0312] X. allelic gain of the gene
[0313] XI. inappropriate post-translational modification of the marker polypeptide

[0314] The present Invention provides assay techniques for detecting mutations in the encoding polynucleotide sequence. These methods include, but are not limited to, methods involving sequence analysis, Southern blot hybridization, restriction enzyme site mapping, and methods involving detection of absence of nucleotide pairing between the polynucleotide to be analyzed and a probe.

[0315] Specific diseases or disorders, e.g., genetic diseases or disorders, are associated with specific allelic variants of polymorphic regions of certain genes, which do not necessarily encode a mutated protein. Thus, the presence of a specific allelic variant of a polymorphic region of a gene in a subject can render the subject susceptible to developing a specific disease or disorder. Polymorphic regions in genes, can be identified, by determining the nucleotide sequence of genes in populations of individuals. If a polymorphic region is identified, then the link with a specific disease can be determined by studying specific populations of individuals, e.g. individuals which developed a specific disease, such as breast cancer. A polymorphic region can be located in any region of a gene, e.g., exons, in coding or non coding regions of exons, introns, and promoter region.

[0316] In an exemplary embodiment, there is provided a polynucleotide composition comprising a polynucleotide probe including a region of nucleotide sequence which is capable of hybridising to a sense or antisense sequence of a gene or naturally occurring mutants thereof, or 5′ or 3′ flanking sequences or intronic sequences naturally associated with the subject genes or naturally occurring mutants thereof. The polynucleotide of a cell is rendered accessible for hybridization, the probe is contacted with the polynucleotide of the sample, and the hybridization of the probe to the sample polynucleotide is detected. Such techniques can be used to detect lesions or allelic variants at either the genomic or mRNA level, including deletions, substitutions, etc., as well as to determine mRNA transcript levels.

[0317] A preferred detection method is allele specific hybridization using probes overlapping the mutation or polymorphic site and having about 5, 10, 20, 25, or 30 nucleotides around the mutation or polymorphic region. In a preferred embodiment of the invention, several probes capable of hybridising specifically to allelic variants are attached to a solid phase support, e.g., a “chip”. Mutation detection analysis using these chips comprising oligonucleotides, also termed “DNA probe arrays” is described e.g., in Cronin et al. (119). In one embodiment, a chip comprises all the allelic variants of at least one polymorphic region of a gene. The solid phase support is then contacted with a test polynucleotide and hybridization to the specific probes is detected. Accordingly, the identity of numerous allelic variants of one or more genes can be identified in a simple hybridization experiment.

[0318] In certain embodiments, detection of the lesion comprises utilizing the probe/primer in a polymerase chain reaction (PCR) (see, e.g. U.S. Pat. Nos. 4,683,195 and 4,683,202) such as anchor PCR or RACE PCR, or, alternatively, in a ligase chain reaction (LCR) [Landegran et al., 1988, (120) and Nakazawa et al., 1994 (121)], the latter of which can be particularly useful for detecting point mutations in the gene; Abravaya et al., 1995, (122)]. In a merely illustrative embodiment, the method includes the steps of (i) collecting a sample of cells from a patient, (ii) isolating polynucleotide (e.g., genomic, mRNA or both) from the cells of the sample, (iii) contacting the polynucleotide sample with one or more primers which specifically hybridize to a polynucleotide sequence under conditions such that hybridization and amplification of the polynucleotide (if present) occurs, and (iv) detecting the presence or absence of an amplification product, or detecting the size of the amplification product and comparing the length to a control sample. It is anticipated that PCR and/or LCR may be desirable to use as a preliminary amplification step in conjunction with any of the techniques used for detecting mutations described herein.

[0319] Alternative amplification methods include: self sustained sequence replication [Guatelli, J. C. et al., 1990, (123)], transcriptional amplification system [Kwoh, D. Y. et al., 1989, (124)], Q-Beta replicase [Lizardi, P. M. et al., 1988, (125)], or any other polynucleotide amplification method, followed by the detection of the amplified molecules using techniques well known to those of skill in the art. These detection schemes are especially useful for the detection of polynucleotide molecules if such molecules are present in very low numbers.

[0320] In a preferred embodiment of the subject assay, mutations in, or allelic variants, of a gene from a sample cell are identified by alterations in restriction enzyme cleavage patterns. For example, sample and control DNA is isolated, amplified (optionally), digested with one or more restriction endonucleases, and fragment length sizes are determined by gel electrophoresis. Moreover; the use of sequence specific ribozymes (see, for example, U.S. Pat. No. 5,498,531) can be used to score for the presence of specific mutations by development or loss of a ribozyme cleavage site.

### In Situ Hybridization

[0321] In one aspect, the method comprises in situ hybridization with a probe derived from a given marker polynucleotide, which sequence is selected from any of the polynucleotide sequences of the SEQ ID NO: 1 to 9, or 11 to 19 or 21 to 26 and 53 to 75 or a sequence complementary thereto. The method comprises contacting the labeled hybridization probe with a sample of a given type of tissue from a patient potentially having malignant neoplasia and breast cancer in particular as well as normal tissue from a person with no malignant neoplasia, and determining whether the probe labels tissue of the patient to a degree significantly different (e.g., by at least a factor of two, or at least a factor of five, or at least a factor of twenty, or at least a factor of fifty) than the degree to which normal tissue is labelled.

[0322] Polypeptide Detection

[0323] The subject invention further provides a method of determining whether a cell sample obtained from a subject possesses an abnormal amount of marker polypeptide which comprises (a) obtaining a cell sample from the subject, (b) quantitatively determining the amount of the marker polypeptide in the sample so obtained, and (c) comparing the amount of the marker polypeptide so determined with a known standard, so as to thereby determine whether the cell sample obtained from the subject possesses an abnormal amount of the marker polypeptide. Such marker polypeptides may be detected by immunohistochemical assays, dot-blot assays, ELISA and the like.

### Antibodies

[0324] Any type of antibody known in the art can be generated to bind specifically to an epitope of a “BREAST CANCER GENE” polypeptide. An antibody as used herein includes intact immuno-globulin molecules, as well as fragments thereof, such as Fab, F(ab)₂, and Fv, which are capable of binding an epitope of a “BREAST CANCER GENE” polypeptide. Typically, at least 6, 8, 10, or 12 contiguous amino acids are required to form an epitope. However, epitopes which involve non-contiguous amino acids may require more, e.g., at least 15, 25, or 50 amino acids.

[0325] An antibody which specifically binds to an epitope of a “BREAST CANCER GENE” polypeptide can be used therapeutically, as well as in immunochemical assays, such as Western blots, ELISAs, radioimmunoassays, immunohistochemical assays, immunoprecipitations, or other immunochemical assays known in the art. Various immunoassays can be used to identify antibodies having the desired specificity. Numerous protocols for competitive binding or immunoradiometric assays are well known in the art. Such immunoassays typically involve the measurement of complex formation between an immunogen and an antibody which specifically binds to the immunogen.

[0326] Typically, an antibody which specifically binds to a “BREAST CANCER GENE” polypeptide provides a detection signal at least 5-, 10-, or 20-fold higher than a detection signal provided with other proteins when used in an immunochemical assay. Preferably, antibodies which specifically bind to “BREAST CANCER GENE” polypeptides do not detect other proteins in immunochemical assays and can immunoprecipitate a “BREAST CANCER GENE” polypeptide from solution.

[0327] “BREAST CANCER GENE” polypeptides can be used to immunize a mammal, such as a mouse, rat, rabbit, guinea pig, monkey, or human, to produce polyclonal antibodies. If desired, a “BREAST CANCER GENE” polypeptide can be conjugated to a carrier protein, such as bovine serum albumin, thyroglobulin, and keyhole limpet hemocyanin. Depending on the host species, various adjuvants can be used to increase the immunological response. Such adjuvants include, but are not limited to, Freund's adjuvant, mineral gels (e.g., aluminum hydroxide), and surface active substances (e.g. lysolecithin, pluronic polyols, polyanions, peptides, oil emulsions, keyhole limpet hemocyanin, and dinitrophenol). Among adjuvants used in humans, BCG (bacilli Calmette-Guerin) and Corynebacterium parvum are especially useful.

[0328] Monoclonal antibodies which specifically bind to a “BREAST CANCER GENE” polypeptide can be prepared using any technique which provides for the production of antibody molecules by continuous cell lines in culture. These techniques include, but are not limited to, the hybridoma technique, the human B cell hybridoma technique, and the EBV hybridoma technique [Kohler et al., 1985, (136); Kozbor et al., 1985, (137); Cote et al., 1983, (138) and Cole et al., 1984, (139)].

[0329] In addition, techniques developed for the production of chimeric antibodies, the splicing of mouse antibody genes to human antibody genes to obtain a molecule with appropriate antigen specificity and biological activity, can be used [Morrison et al., 1984, (140); Neuberger et al., 1984, (141); Takeda et al., 1985, (142)]. Monoclonal and other antibodies also can be humanized to prevent a patient from mounting an immune response against the antibody when it is used therapeutically. Such antibodies may be sufficiently similar in sequence to human antibodies to be used directly in therapy or may require alteration of a few key residues. Sequence differences between rodent antibodies and human sequences can be minimized by replacing residues which differ from those in the human sequences by site directed mutagenesis of individual residues or by grating of entire complementarity determining regions. Alternatively, humanized antibodies can be produced using recombinant methods, as described in GB2188638B. Antibodies which specifically bind to a “BREAST CANCER GENE” polypeptide can contain antigen binding sites which are either partially or fully humanized, as disclosed in U.S. Pat. No. 5,565,332.

[0330] Alternatively, techniques described for the production of single chain antibodies can be adapted using methods known in the art to produce single chain antibodies which specifically bind to “BREAST CANCER GENE” polypeptides. Antibodies with related specificity, but of distinct idiotypic composition, can be generated by chain shuffling from random combinatorial immunoglobulin libraries [Burton, 1991, (143)].

[0331] Single-chain antibodies also can be constructed using a DNA amplification method, such as PCR, using hybridoma cDNA as a template [Thirion et al., 1996, (144)]. Single-chain antibodies can be mono- or bispecific, and can be bivalent or tetravalent Construction of tetravalent, bispecific single-chain antibodies is taught, for example, in Coloma & Morrison, (145). Construction of bivalent, bispecific single-chain antibodies is taught in Mallender & Voss, (146).

[0332] A nucleotide sequence encoding a single-chain antibody can be constructed using manual or automated nucleotide synthesis, cloned into an expression construct using standard recombinant DNA methods, and introduced into a cell to express the coding sequence, as described below. Alternatively, single-chain antibodies can be produced directly using, for example, filamentous phage technology [Verhaar et al., 1995, (147); Nicholls et al., 1993, (148)].

[0333] Antibodies which specifically bind to “BREAST CANCER GENE” polypeptides also can be produced by inducing in vivo production in the lymphocyte population or by screening immunoglobulin libraries or panels of highly specific binding reagents as disclosed in the literature [Orlandi et al., 1989, (149) and Winter et al., 1991, (150)].

[0334] Other types of antibodies can be constructed and used therapeutically in methods of the invention. For example, chimeric antibodies can be constructed as disclosed in WO 93/03151. Binding proteins which are derived from immunoglobulins and which are multivalent and multispecific, such as the antibodies described in WO 94/13804, also can be prepared.

[0335] Antibodies according to the invention can be purified by methods well known in the art. For example, antibodies can be affinity purified by passage over a column to which a “BREAST CANCER GENE” polypeptide is bound. The bound antibodies can then be eluted from the column using a buffer with a high salt concentration.

[0336] Immunoassays are commonly used to quantify the levels of proteins in cell samples, and many other immunoassay techniques are known in the art. The invention is not limited to a particular assay procedure, and therefore is intended to include both homogeneous and heterogeneous procedures. Exemplary immunoassays which can be conducted according to the invention include fluorescence polarisation immunoassay (FPIA), fluorescence immunoassay (FIA), enzyme immunoassay (EIA), nephelometric inhibition immunoassay (NIA), enzyme linked immunosorbent assay (ELISA), and radioimmunoassay (RIA). An indicator moiety, or label group, can be attached to the subject antibodies and is selected so as to meet the needs of various uses of the method which are often dictated by the availability of assay equipment and compatible immunoassay procedures. General techniques to be used in performing the various immunoassays noted above are known to those of ordinary skill in the art

[0337] In another embodiment, the level of at least one product encoded by any of the polynucleotide sequences of the SEQ ID NO: 2 to 6, 8, 9, 11 to 16, 18, 19 or 21 to 26 or 53 to 75 or of at least 2 products encoded by a polynucleotide selected from SEQ ID NO: 1 to 26 and 53 to 75 or a sequence complementary thereto, in a biological fluid (e.g., blood or urine) of a patient may be determined as a way of monitoring the level of expression of the marker polynucleotide sequence in cells of that patient. Such a method would include the steps of obtaining a sample of a biological fluid from the patient, contacting the sample (or proteins from the sample) with an antibody specific for a encoded marker polypeptide, and determining the amount of immune complex formation by the antibody, with the amount of immune complex formation being indicative of the level of the marker encoded product in the sample. This determination is particularly instructive when compared to the amount of immune complex formation by the same antibody in a control sample taken from a normal individual or in one or more samples previously or subsequently obtained from the same person.

[0338] In another embodiment, the method can be used to determine the amount of marker polypeptide present in a cell, which in turn can be correlated with progression of the disorder, e.g., plaque formation. The level of the marker polypeptide can be used predictively to evaluate whether a sample of cells contains cells which are, or are predisposed towards becoming, plaque associated cells. The observation of marker polypeptide level can be utilized in decisions regarding, e.g., the use of more stringent therapies.

[0339] As set out above, one aspect of the present invention relates to diagnostic assays for determining, in the context of cells isolated from a patient, if the level of a marker polypeptide is significantly reduced in the sample cells. The term “significantly reduced” refers to a cell phenotype wherein the cell possesses a reduced cellular amount of the marker polypeptide relative to a normal cell of similar tissue origin. For example, a cell may have less than about 50%, 25%, 10%, or 5% of the marker polypeptide that a normal control cell. In particular, the assay evaluates the level of marker polypeptide in the test cells, and, preferably, compares the measured level with marker polypeptide detected in at least one control cell, e.g., a normal cell and/or a transformed cell of known phenotype.

[0340] Of particular importance to the subject invention is the ability to quantify the level of marker polypeptide as determined by the number of cells associated with a normal or abnormal marker polypeptide level. The number of cells with a particular marker polypeptide phenotype may then be correlated with patient prognosis. In one embodiment of the invention, the marker polypeptide phenotype of the lesion is determined as a percentage of cells in a biopsy which are found to have abnormally high/low levels of the marker polypeptide. Such expression may be detected by immunohistochemical assays, dot-blot assays, ELISA and the like.

### Immunohistochemistry

[0341] Where tissue samples are employed, immunohistochemical staining may be used to determine the number of cells having the marker polypeptide phenotype. For such staining, a multiblock of tissue is taken from the biopsy or other tissue sample and subjected to proteolytic hydrolysis, employing such agents as protease K or pepsin. In certain embodiments, it may be desirable to isolate a nuclear fraction from the sample cells and detect the level of the marker polypeptide in the nuclear fraction.

[0342] The tissues samples are fixed by treatment with a reagent such as formalin, glutaraldehyde, methanol, or the like. The samples are then incubated with an antibody, preferably a monoclonal antibody, with binding specificity for the marker polypeptides. This antibody may be conjugated to a Label for subsequent detection of binding. samples are incubated for a time Sufficient for formation of the immunocomplexes. Binding of the antibody is then detected by virtue of a Label conjugated to this antibody. Where the antibody is unlabelled, a second labeled antibody may be employed, e.g., which is specific for the isotype of the anti-marker polypeptide antibody. Examples of labels which may be employed include radionuclides, fluorescence, chemiluminescence, and enzymes.

[0343] Where enzymes are employed, the Substrate for the enzyme may be added to the samples to provide a colored or fluorescent product. Examples of suitable enzymes for use in conjugates include horseradish peroxidase, alkaline phosphatase, malate dehydrogenase and the like. Where not commercially available, such antibody-enzyme conjugates are readily produced by techniques known to those skilled in the art.

[0344] In one embodiment, the assay is performed as a dot blot assay. The dot blot assay finds particular application where tissue samples are employed as it allows determination of the average amount of the marker polypeptide associated with a Single cell by correlating the amount of marker polypeptide in a cell-free extract produced from a predetermined number of cells.

[0345] In yet another embodiment, the invention contemplates using one or more antibodies which are generated against one or more of the marker polypeptides of this invention, which polypeptides are encoded by any of the polynucleotide sequences of the SEQ ID NO: 1 to 26 or 53 to 75. Such a panel of antibodies may be used as a reliable diagnostic probe for breast cancer. The assay of the present invention comprises contacting a biopsy sample containing cells, e.g., macrophages, with a panel of antibodies to one or more of the encoded products to determine the presence or absence of the marker polypeptides.

[0346] The diagnostic methods of the subject invention may also be employed as follow-up to treatment e.g., quantification of the level of marker polypeptides may be indicative of the effectiveness of current or previously employed therapies for malignant neoplasia and breast cancer in particular as well as the effect of these therapies upon patient prognosis.

[0347] The diagnostic assays described above can be adapted to be used as prognostic assays, as well. Such an application takes advantage of the sensitivity of the assays of the Invention to events which take place at characteristic stages in the progression of plaque generation in case of malignant neoplasia. For example, a given marker gene may be up- or down-regulated at a very early stage, perhaps before the cell is developing into a foam cell, while another marker gene may be characteristically up or down regulated only at a much later stage. Such a method could involve the steps of contacting the mRNA of a test cell with a polynucleotide probe derived from a given marker polynucleotide which is expressed at different characteristic levels in breast cancer tissue cells at different stages of malignant neoplasia progression, and determining the approximate amount of hybridization of the probe to the mRNA of the cell, such amount being an indication of the level of expression of the gene in the cell, and thus an indication of the stage of disease progression of the cell; alternatively, the assay can be carried out with an antibody specific for the gene product of the given marker polynucleotide, contacted with the proteins of the test cell. A battery of such tests will disclose not only the existence of a certain arteriosclerotic plaque, but also will allow the clinician to select the mode of treatment most appropriate for the disease, and to predict the likelihood of success of that treatment.

[0348] The methods of the invention can also be used to follow the clinical course of a given breast cancer predisposition. For example, the assay of the Invention can be applied to a blood sample from a patient; following treatment of the patient for BREAST CANCER, another blood sample is taken and the test repeated. Successful treatment will result in removal of demonstrate differential expression, characteristic of the breast cancer tissue cells, perhaps approaching or even surpassing normal levels.

### Polypeptide Activity

[0349] In one embodiment the present invention provides a method for screening potentially therapeutic agents which modulate the activity of one or more “BREAST CANCER GENE” polypeptides, such that if the activity of the polypeptide is increased as a result of the upregulation of the “BREAST CANCER GENE” in a subject having or at risk for malignant neoplasia and breast cancer in particular, the therapeutic substance will decrease the activity of the polypeptide relative to the activity of the some polypeptide in a subject not having or not at risk for malignant neoplasia or breast cancer in particular but not treated with the therapeutic agent. Likewise, if the activity of the polypeptide as a result of the downregulation of the “BREAST CANCER GENE” is decreased in a subject having or at risk for malignant neoplasia or breast cancer in particular, the therapeutic agent will increase the activity of the polypeptide relative to the activity of the same polypeptide in a subject not having or not at risk for malignant neoplasia or breast cancer in particular, but not treated with the therapeutic agent.

[0350] The activity of the “BREAST CANCER GENE” polypeptides indicated in Table 2 or 3 may be measured by any means known to those of skill in the art, and which are particular for the type of activity performed by the particular polypeptide. Examples of specific assays which may be used to measure the activity of particular polynucleotides are shown below.

a) G protein Coupled Receptors

[0351] In one embodiment, the “BREAST CANCER GENE” polynucleotide may encode a G protein coupled receptor. In one embodiment, the present invention provides a method of screening potential modulators (inhibitors or activators) of the G protein coupled receptor by measuring changes in the activity of the receptor in the presence of a candidate modulator.

### 1. Gᵢ-Coupled Receptors

[0352] Cells (such as CHO cells or primary cells) are stably transfected with the relevant receptor and with an inducible CRE-luciferase construct. Cells are grown in 50% Dulbecco's modified Eagle medium/50% F12 (DMEM/F12) supplemented with 10% FBS, at 37° C. in a humidified atmosphere with 10% CO₂ and are routinely split at a ratio of 1:10 every 2 or 3 days. Test cultures are seeded into 384-well plates at an appropriate density (e.g. 2000 cells/well in 35 μl cell culture medium) in DMEM/F12 with FBS, and are grown for 48 hours (range: ˜24-60 hours, depending on cell line). Growth medium is then exchanged against serum free medium (SFM; e.g. Ultra-CHO), containing 0.1% BSA. Test compounds dissolved in DMSO are diluted in SFM and transferred to the test cultures (maximal final concentration 10 μmolar), followed by addition of forskolin (˜1 μmolar, final conc.) in SFM+0.1% BSA 10 minutes later. In case of antagonist screening both, an appropriate concentration of agonist, and forskolin are added. The plates are incubated at 37° C. in 10% CO₂ for 3 hours. Then the supernatant is removed, cells are lysed with lysis reagent (25 mmolar phosphate-buffer, pH 7,8, containing 2 mmolar DDT, 10% glycerol and 3% Triton X100). The luciferase reaction is started by addition of substrate-buffer (e.g. luciferase assay reagent, Promega) and luminescence is immediately determined (e.g. Berthold luminometer or Hamamatzu camera system).

### 2. Gₛ-coupled Receptors

[0353] Cells (such as CHO cells or primary cells) are stably transfected with the relevant receptor and with an inducible CRE-luciferase construct Cells are grown in 50% Dulbecco's modified Eagle medium/50% F12 (DMEM/F12) supplemented with 10% FBS, at 37° C. in a humidified atmosphere with 10% CO₂ and are routinely split at a ratio of 1:10 every 2 or 3 days. Test cultures are seeded into 384-well plates at an appropriate density (e.g. 1000 or 2000 cells/well in 35 μl cell culture medium) in DMEM/F12 with FBS, and are grown for 48 hours (range: ˜24-60 hours, depending on cell line). The assay is started by addition of test-compounds in serum free medium (SFM; e.g. Ultra-CHO) containing 0.1% BSA: Test compounds are dissolved in DMSO, diluted in SFM and transferred to the test cultures (maximal final concentration 10 μmolar, DMSO conc. <0.6%). In case of antagonist screening an appropriate concentration of agonist is added 5-10 minutes later. The plates are incubated at 37° C. in 10% CO₂ for 3 hours. Then the cells are lysed with 10 μl lysis reagent per well (25 mmolar phosphate-buffer, pH 7,8, containing 2 mmolar DDT, 10% glycerol and 3% Triton X100) and the luciferase reaction is started by addition of 20 μl substrate-buffer per well (e.g. luciferase assay reagent, Promega). Measurement of luminescence is started immediately (e.g. Berthold luminometer or Hamamatzu camera system).

### 3. G_{g}-coupled Receptors

[0354] Cells (such as CHO cells or primary cells) are stably transfected with the relevant receptor. Cells expressing functional receptor protein are grown in 50% Dulbecco's modified Eagle medium/50% F12 (DMEM/F12) supplemented with 10% FBS, at 37° C. in a humidified atmosphere with 5% CO₂ and are routinely split at a cell line dependent ratio every 3 or 4 days. Test cultures are seeded into 384-well plates at an appropriate density (e.g. 2000 cells/well in 35 μl cell culture medium) in DMEM/F12 with FBS, and are grown for 48 hours (range: ˜24-60 hours, depending on cell line). Growth medium is then exchanged against physiological salt solution (e.g. Tyrode solution). Test compounds dissolved in DMSO are diluted in Tyrode solution containing 0.1% BSA and transferred to the test cultures (maximal final concentration 10 μmolar). After addition of the receptor specific agonist the resulting Gq-mediated intracellular calcium increase is measured using appropriate read-out systems (e.g. calcium-sensitive dyes).

b) Ion Channels

[0355] Ion channels are integral membrane proteins involved in electrical signaling, transmembrane signal transduction, and electrolyte and solute transport. By forming macromolecular pores through the membrane lipid bilayer, ion channels account for the flow of specific ion species driven by the electrochemical potential gradient for the permeating ion. At the single molecule level, individual channels undergo conformational transitions (“gating”) between the ‘open’ (ion conducting) and ‘closed’ (non conducting) state. Typical single channel openings last for a few milliseconds and result in elementary transmembrane currents in the range of 10⁻⁹-10⁻¹² Ampere. Channel gating is controlled by various chemical and/or biophysical parameters, such as neurotransmitters and intracellular second messengers (‘ligand-gated’ channels) or membrane potential (‘voltage-gated’ channels). Ion channels are functionally characterized by their ion selectivity, gating properties, and regulation by hormones and pharmacological agents. Because of their central role in signaling and transport processes, ion channels present ideal targets for pharmacological therapeutics in various pathophysiological settings.

[0356] In one embodiment, the “BREAST CANCER GENE” may encode an ion channel. In one embodiment, the present invention provides a method of screening potential activators or inhibitors of channels activity of the “BREAST CANCER GENE” polypeptide. Screening for compounds interaction with ion channels to either inhibit or promote their activity can be based on (1.) binding and (2.) functional assays in living cells [Hille (183)].
[0357] 1. For ligand-gated channels, e.g. ionotropic neurotransmitter/hormone receptors, assays can be designed detecting binding to the target by competition between the compound and a labeled ligand.
[0358] 2. Ion channel function can be tested functionally in living cells. Target proteins are either expressed endogenously in appropriate reporter cells or are introduced recombinantly. Channel activity can be monitored by (2.1) concentration changes of the permeating ion (most prominently Ca²⁺ ions), (2.2) by changes in the transmembrane electrical potential gradient, and (2.3) by measuring a cellular response (e.g. expression of a reporter gene, secretion of a neurotransmitter) triggered or modulated by the target activity.
[0359] 2.1 Channel activity results in transmembrane ion fluxes. Thus activation of ionic channels can be monitored by the resulting changes in intracellular ion concentrations using luminescent or fluorescent indicators. Because of its wide dynamic range and availability of suitable indicators this applies particularly to changes in intracellular Ca²⁺ ion concentration ([Ca²⁺]ᵢ). [Ca²⁺]ᵢ can be measured, for example, by aequorin luminescence or fluorescence dye technology (e.g. using Fluo-3, Indo-1, Fura-2). Cellular assays can be designed where either the Ca²⁺ flux through the target channel itself is measured directly or where modulation of the target channel affects membrane potential and thereby the activity of co-expressed voltage-gated Ca²⁺ channels.
[0360] 2.2 Ion channel currents result in changes of electrical membrane potential (Vₘ) which can be monitored directly using potentiometric fluorescent probes. These electrically charged indicators (e.g. the anionic oxonol dye DiBAC₄(3)) redistribute between extra- and intracellular compartment in response to voltage changes. The equilibrium distribution is governed by the Nemst-equation. Thus changes in membrane potential results in concomitant changes in cellular fluorescence. Again, changes in Vₘ might be caused directly by the activity of the target ion channel or through amplification and/or prolongation of the signal by channels co-expressed in the same cell.
[0361] 2.3 Target channel activity can cause cellular Ca²⁺ entry either directly or through activation of additional Ca²⁺ channel (see 2.1). The resulting intracellular Ca²⁺ signals regulate a variety of cellular responses, e.g. secretion or gene transcription. Therefore modulation of the target channel can be detected by monitoring secretion of a known hormone/transmitter from the target-expressing cell or through expression of a reporter gene (e.g. luciferase) controlled by an Ca²⁺-responsive promoter element (e.g. cyclic AMP/Ca²⁺-responsive elements; CRE).
   c) DNA-Binding Proteins and Transcription Factors

[0362] In one embodiment, the “BREAST CANCER GENE” may encode a DNA-binding protein or a transcription factor. The activity of such a DNA-binding protein or a transcription factor may be measured, for example, by a promoter assay which measures the ability of the DNA-binding protein or the transcription factor to initiate transcription of a test sequence linked to a particular promoter. In one embodiment, the present invention provides a method of screening test compounds for its ability to modulate the activity of such a DNA-binding protein or a transcription factor by measuring the changes in the expression of a test gene which is regulated by a promoter which is responsive to the transcription factor.

d) Promotor Assays

[0363] A promoter assay was set up with a human hepatocellular carcinoma cell HepG2 that was stably transfected with a luciferase gene under the control of a gene of interest (e.g. thyroid hormone) regulated promoter. The vector 2xIROluc, which was used for transfection, carries a thyroid hormone responsive element (TRE) of two 12 bp inverted palindromes separated by an 8 bp spacer in front of a tk minimal promoter and the luciferase gene. Test cultures were seeded in 96 well plates in serum-free Eagle's Minimal Essential Medium supplemented with glutamine, tricine, sodium pyruvate, non-essential amino acids, insulin, selen, transferrin, and were cultivated in a humidified atmosphere at 10% CO₂ at 37° C. After 48 hours of incubation serial dilutions of test compounds or reference compounds (L-T3, L-T4 e.g.) and co-stimulator if appropriate (final concentration 1 nM) were added to the cell cultures and incubation was continued for the optimal time (e.g. another 4-72 hours). The cells were then lysed by addition of buffer containing Triton X100 and luciferin and the luminescence of luciferase induced by T3 or other compounds was measured in a luminometer. For each concentration of a test compound replicates of 4 were tested. EC₅₀-values for each test compound were calculated by use of the Graph Pad Prism Scientific software.

### Screening Methods

[0364] The invention provides assays for screening test compounds which bind to or modulate the activity of a “BREAST CANCER GENE” polypeptide or a “BREAST CANCER GENE” polynucleotide. A test compound preferably binds to a “BREAST CANCER GENE” polypeptide or polynucleotide. More preferably, a test compound decreases or increases “BREAST CANCER GENE” activity by at least about 10, preferably about 50, more preferably about 75, 90, or 100% relative to the absence of the test compound.

### Test Compounds

[0365] Test compounds can be pharmacological agents already known in the art or can be compounds previously unknown to have any pharmacological activity. The compounds can be naturally occurring or designed in the laboratory. They can be isolated from microorganisms, animals, or plants, and can be produced recombinant, or synthesised by chemical methods known in the art. If desired, test compounds can be obtained using any of the numerous combinatorial library methods known in the art, including but not limited to, biological libraries, spatially addressable parallel solid phase or solution phase libraries, synthetic library methods requiring deconvolution, the one-bead one-compound library method, and synthetic library methods using affinity chromatography selection. The biological library approach is limited to polypeptide libraries, while the other four approaches are applicable to polypeptide, non-peptide oligomer, or small molecule libraries of compounds. [For review see Lam, 1997, (151)].

[0366] Methods for the synthesis of molecular libraries are well known in the art [see, for example, DeWitt et al., 1993, (152); Erb et al., 1994, (153); Zuckermann et al., 1994, (154); Cho et al., 1993, (155); Carell et al., 1994, (156) and Gallop et al., 1994, (157). Libraries of compounds can be presented in solution [see, e.g., Houghten, 1992, (158)], or on beads [Lam, 1991, (159)], DNA-chips [Fodor, 1993, (160)], bacteria or spores (Ladner, U.S. Pat. No. 5,223,409), plasmids [Cull et al., 1992, (161)], or phage [Scott & Smith, 1990, (162); Devlin, 1990, (163); Cwirla et al., 1990, (164); Felici, 1991, (165)].

### High Throughput Screening

[0367] Test compounds can be screened for the ability to bind to “BREAST CANCER GENE” polypeptides or polynucleotides or to affect “BREAST CANCER GENE” activity or “BREAST CANCER GENE” expression using high throughput screening. Using high throughput screening, many discrete compounds can be tested in parallel so that large numbers of test compounds can be quickly screened. The most widely established techniques utilize 96-well, 384-well or 1536-well microtiter plates. The wells of the microtiter plates typically require assay volumes that range from 5 to 500 μl. In addition to the plates, many instruments, materials, pipettors, robotics, plate washers, and plate readers are commercially available to fit the microwell formats.

[0368] Alternatively, free format assays, or assays that have no physical barrier between samples, can be used. For example, an assay using pigment cells (melanocytes) in a simple homogeneous assay for combinatorial peptide libraries is described by Jayawickreme et al., (166). The cells are placed under agarose in culture dishes, then beads that carry combinatorial compounds are placed on the surface of the agarose. The combinatorial compounds are partially released the compounds from the beads. Active compounds can be visualised as dark pigment areas because, as the compounds diffuse locally into the gel matrix, the active compounds cause the cells to change colors.

[0369] Another example of a free format assay is described by Chelsky, (167). Chelsky placed a simple homogenous enzyme assay for carbonic anhydrase inside an agarose gel such that the enzyme in the gel would cause a color change throughout the gel. Thereafter, beads carrying combinatorial compounds via a photolinker were placed inside the gel and the compounds were partially released by UV light. Compounds that inhibited the enzyme were observed as local zones of inhibition having less color change.

[0370] In another example, combinatorial libraries were screened for compounds that had cytotoxic effects on cancer cells growing in agar [Salmon et al., 1996, (168)].

[0371] Another high throughput screening method is described in Beutel et al., U.S. Pat. No. 5,976,813. In this method, test samples are placed in a porous matrix. One or more assay components are then placed within, on top of, or at the bottom of a matrix such as a gel, a plastic sheet, a filter, or other form of easily manipulated solid support. When samples are introduced to the porous matrix they diffuse sufficiently slowly, such that the assays can be performed without the test samples running together.

### Binding Assays

[0372] For binding assays, the test compound is preferably a small molecule which binds to and occupies, for example, the ATP/GTP binding site of the enzyme or the active site of a “BREAST CANCER GENE” polypeptide, such that normal biological activity is prevented. Examples of such small molecules include, but are not limited to, small peptides or peptide-like molecules.

[0373] In binding assays, either the test compound or a “BREAST CANCER GENE” polypeptide can comprise a detectable label, such as a fluorescent, radioisotopic, chemiluminescent, or enzymatic label, such as horseradish peroxidase, alkaline phosphatase, or luciferase. Detection of a test compound which is bound to a “BREAST CANCER GENE” polypeptide can then be accomplished, for example, by direct counting of radioemmission, by scintillation counting, or by determining conversion of an appropriate substrate to a detectable product.

[0374] Alternatively, binding of a test compound to a “BREAST CANCER GENE” polypeptide can be determined without labeling either of the interactants. For example, a microphysiometer can be used to detect binding of a test compound with a “BREAST CANCER GENE” polypeptide. A microphysiometer (e.g., CytosensorJ) is an analytical instrument that measures the rate at which a cell acidifies its environment using a light-addressable potentiometric sensor (LAPS). Changes in this acidification rate can be used as an indicator of the interaction between a test compound and a “BREAST CANCER GENE” polypeptide [McConnell et al., 1992, (169)].

[0375] Determining the ability of a test compound to bind to a “BREAST CANCER GENE” polypeptide also can be accomplished using a technology such as real-time Bimolecular Interaction Analysis (BIA) [Sjolander & Urbaniczky, 1991, (170), and Szabo et al., 1995, (171)]. BIA is a technology for studying biospecific interactions in real time, without labeling any of the interactants (e.g., BIAcore™). Changes in the optical phenomenon surface plasmon resonance (SPR) can be used as an indication of real-time reactions between biological molecules.

[0376] In yet another aspect of the invention, a “BREAST CANCER GENE” polypeptide can be used as a “bait protein” in a two-hybrid assay or three-hybrid assay [see, e.g., U.S. Pat. No. 5,283,317; Zervos et al., 1993, (172); Madura et al., 1993, (173); Bartel et al., 1993, (174); Iwabuchi et al., 1993, (175) and Brent WO 94/10300], to identify other proteins which bind to or interact with the “BREAST CANCER GENE” polypeptide and modulate its activity.

[0377] The two-hybrid system is based on the modular nature of most transcription factors, which consist of separable DNA-binding and activation domains. Briefly, the assay utilizes two different DNA constructs. For example, in one construct, polynucleotide encoding a “BREAST CANCER GENE” polypeptide can be fused to a polynucleotide encoding the DNA binding domain of a known transcription factor (e.g., GAL4). In the other construct a DNA sequence that encodes an unidentified protein (“prey” or “sample”) can be fused to a polynucleotide that codes for the activation domain of the known transcription factor. If the “bait” and the “prey” proteins are able to interact in vivo to form an protein-dependent complex, the DNA-binding and activation domains of the transcription factor are brought into close proximity. This proximity allows transcription of a reporter gene (e.g., LacZ), which is operably linked to a transcriptional regulatory site responsive to the transcription factor. Expression of the reporter gene can be detected, and cell colonies containing the functional transcription factor can be isolated and used to obtain the DNA sequence encoding the protein which interacts with the “BREAST CANCER GENE” polypeptide.

[0378] It may be desirable to immobilize either a “BREAST CANCER GENE” polypeptide (or polynucleotide) or the test compound to facilitate separation of bound from unbound forms of one or both of the interactants, as well as to accommodate automation of the assay. Thus, either a “BREAST CANCER GENE” polypeptide (or polynucleotide) or the test compound can be bound to a solid support. Suitable solid supports include, but are not limited to, glass or plastic slides, tissue culture plates, microtiter wells, tubes, silicon chips, or particles such as beads (including, but not limited to, latex, polystyrene, or glass beads). Any method known in the art can be used to attach a “BREAST CANCER GENE” polypeptide (or polynucleotide) or test compound to a solid support, including use of covalent and non-covalent linkages, passive absorption, or pairs of binding moieties attached respectively to the polypeptide (or polynucleotide) or test compound and the solid support. Test compounds are preferably bound to the solid support in an array, so that the location of individual test compounds can be tracked. Binding of a test compound to a “BREAST CANCER GENE” polypeptide (or polynucleotide) can be accomplished in any vessel suitable for containing the reactants. Examples of such vessels include microtiter plates, test tubes, and microcentrifuge tubes.

[0379] In one embodiment, a “BREAST CANCER GENE” polypeptide is a fusion protein comprising a domain that allows the “BREAST CANCER GENE” polypeptide to be bound to a solid support. For example, glutathione S-transferase fusion proteins can be adsorbed onto glutathione sepharose beads (Sigma Chemical, St Louis, Mo.) or glutathione derivatized microtiter plates, which are then combined with the test compound or the test compound and the nonadsorbed “BREAST CANCER GENE” polypeptide; the mixture is then incubated under conditions conducive to complex formation (e.g., at physiological conditions for salt and pH). Following incubation, the beads or microtiter plate wells are washed to remove any unbound components. Binding of the interactants can be determined either directly or indirectly, as described above. Alternatively, the complexes can be dissociated from the solid support before binding is determined.

[0380] Other techniques for immobilising proteins or polynucleotides on a solid support also can be used in the screening assays of the invention. For example, either a “BREAST CANCER GENE” polypeptide (or polynucleotide) or a test compound can be immobilized utilizing conjugation of biotin and streptavidin. Biotinylated “BREAST CANCER GENE” polypeptides (or polynucleotides) or test compounds can be prepared from biotin NHS (N-hydroxysuccinimide) using techniques well known in the art (e.g., biotinylation kit, Pierce Chemicals, Rockford, Ill.) and immobilized in the wells of streptavidin-coated 96 well plates (Pierce Chemical). Alternatively, antibodies which specifically bind to a “BREAST CANCER GENE” polypeptide, polynucleotide, or a test compound, but which do not interfere with a desired binding site, such as the ATP/GTP binding site or the active site of the “BREAST CANCER GENE” polypeptide, can be derivatised to the wells of the plate. Unbound target or protein can be trapped in the wells by antibody conjugation.

[0381] Methods for detecting such complexes, in addition to those described above for the GST-immobilized complexes, include immunodetection of complexes using antibodies which specifically bind to a “BREAST CANCER GENE” polypeptide or test compound, enzyme-linked assays which rely on detecting an activity of a “BREAST CANCER GENE” polypeptide, and SDS gel electrophoresis under non-reducing conditions.

[0382] Screening for test compounds which bind to a “BREAST CANCER GENE” polypeptide or polynucleotide also can be carried out in an intact cell. Any cell which comprises a “BREAST CANCER GENE” polypeptide or polynucleotide can be used in a cell-based assay system. A “BREAST CANCER GENE” polynucleotide can be naturally occurring in the cell or can be introduced using techniques such as those described above. Binding of the test compound to a “BREAST CANCER GENE” polypeptide or polynucleotide is determined as described above.

### Modulation of Gene Expression

[0383] In another embodiment, test compounds which increase or decrease “BREAST CANCER GENE” expression are identified. A “BREAST CANCER GENE” polynucleotide is contacted with a test compound, and the expression of an RNA or polypeptide product of the “BREAST CANCER GENE” polynucleotide is determined. The level of expression of appropriate mRNA or poly-peptide in the presence of the test compound is compared to the level of expression of mRNA or polypeptide in the absence of the test compound. The test compound can then be identified as a modulator of expression based on this comparison. For example, when expression of mRNA or polypeptide is greater in the presence of the test compound than in its absence, the test compound is identified as a stimulator or enhancer of the mRNA or polypeptide expression. Alternatively, when expression of the mRNA or polypeptide is less in the presence of the test compound than in its absence, the test compound is identified as an inhibitor of the mRNA or polypeptide expression.

[0384] The level of “BREAST CANCER GENE” mRNA or polypeptide expression in the cells can be determined by methods well known in the art for detecting mRNA or polypeptide. Either qualitative or quantitative methods can be used. The presence of polypeptide products of a “BREAST CANCER GENE” polynucleotide can be determined, for example, using a variety of techniques known in the art, including immunochemical methods such as radioimmunoassay, Western blotting, and immunohistochemistry. Alternatively, polypeptide synthesis can be determined in vivo, in a cell culture, or in an in vitro translation system by detecting incorporation of labeled amino acids into a “BREAST CANCER GENE” polypeptide.

[0385] Such screening can be carried out either in a cell-free assay system or in an intact cell. Any cell which expresses a “BREAST CANCER GENE” polynucleotide can be used in a cell-based assay system. A “BREAST CANCER GENE” polynucleotide can be naturally occurring in the cell or can be introduced using techniques such as those described above. Either a primary culture or an established cell line, such as CHO or human embryonic kidney 293 cells, can be used.

### Therapeutic Indications and Methods

[0386] Therapies for treatment of breast cancer primarily relied upon effective chemotherapeutic drugs for intervention on the cell proliferation, cell growth or angiogenesis. The advent of genomics-driven molecular target identification has opened up the possibility of identifying new breast cancer-specific targets for therapeutic intervention that will provide safer, more effective treatments for malignant neoplasia patients and breast cancer patients in particular. Thus, newly discovered breast cancer-associated genes and their products can be used as tools to develop innovative therapies. The identification of the Her2/neu receptor kinase presents exciting new opportunities for treatment of a certain subset of tumor patients as described before. Genes playing important roles in any of the physiological processes outlined above can be characterized as breast cancer targets. Genes or gene fragments identified through genomics can readily be expressed in one or more heterologous expression systems to produce functional recombinant proteins. These proteins are characterized in vitro for their biochemical properties and then used as tools in high-throughput molecular screening programs to identify chemical modulators of their biochemical activities. Modulators of target gene expression or protein activity can be identified in this manner and subsequently tested in cellular and in vivo disease models for therapeutic activity. Optimization of lead compounds with iterative testing in biological models and detailed pharmacokinetic and toxicological analyses form the basis for drug development and subsequent testing in humans.

[0387] This invention further pertains to the use of novel agents identified by the screening assays described above. Accordingly, it is within the scope of this invention to use a test compound identified as described herein in an appropriate animal model. For example, an agent identified as described herein (e.g., a modulating agent, an antisense polynucleotide molecule, a specific antibody, ribozyme, or a human “BREAST CANCER GENE” polypeptide binding molecule) can be used in an animal model to determine the efficacy, toxicity, or side effects of treatment with such an agent. Alternatively, an agent identified as described herein can be used in an animal model to determine the mechanism of action of such an agent. Furthermore, this invention pertains to uses of novel agents identified by the above described screening assays for treatments as described herein.

[0388] A reagent which affects human “BREAST CANCER GENE” activity can be administered to a human cell, either in vitro or in vivo, to reduce or increase human “BREAST CANCER GENE” activity. The reagent preferably binds to an expression product of a human “BREAST CANCER GENE”. If the expression product is a protein, the reagent is preferably an antibody. For treatment of human cells ex vivo, an antibody can be added to a preparation of stem cells which have been removed from the body. The cells can then be replaced in the same or another human body, with or without clonal propagation, as is known in the art.

[0389] In one embodiment, the reagent is delivered using a liposome. Preferably, the liposome is stable in the animal into which it has been administered for at least about 30 minutes, more preferably for at least about 1 hour, and even more preferably for at least about 24 hours. A liposome comprises a lipid composition that is capable of targeting a reagent, particularly a polynucleotide, to a particular site in an animal, such as a human. Preferably, the lipid composition of the liposome is capable of targeting to a specific organ of an animal, such as the lung, liver, spleen, heart brain, lymph nodes, and skin.

[0390] A liposome useful in the present invention comprises a lipid composition that is capable of fusing with the plasma membrane of the targeted cell to deliver its contents to the cell. Preferably, the transfection efficiency of a liposome is about 0.5 μg of DNA per 16 nmol of liposome delivered to about 10⁶ cells, more preferably about 1.0 μg of DNA per 16 nmol of liposome delivered to about 10⁶ cells, and even more preferably about 2.0 μg of DNA per 16 nmol of liposome delivered to about 10⁶ cells. Preferably, a liposome is between about 100 and 500 nm, more preferably between about 150 and 450 nm, and even more preferably between about 200 and 400 nm in diameter.

[0391] Suitable liposomes for use in the present invention include those liposomes usually used in, for example, gene delivery methods known to those of skill in the art. More preferred liposomes include liposomes having a polycationic lipid composition and/or liposomes having a cholesterol backbone conjugated to polyethylene glycol. Optionally, a liposome comprises a compound capable of targeting the liposome to a particular cell type, such as a cell-specific ligand exposed on the outer surface of the liposome.

[0392] Complexing a liposome with a reagent such as an antisense oligonucleotide or ribozyme can be achieved using methods which are standard in the art (see, for example, U.S. Pat. No. 5,705,151). Preferably, from about 0.1 μg to about 10 μg of polynucleotide is combined with about 8 nmol of liposomes, more preferably from about 0.5 μg to about 5 μg of polynucleotides are combined with about 8 nmol liposomes, and even more preferably about 1.0 μg of polynucleotides is combined with about 8 nmol liposomes.

[0393] In another embodiment, antibodies can be delivered to specific tissues in vivo using receptor-mediated targeted delivery. Receptor-mediated DNA delivery techniques are taught in, for example, Findeis et al., 1993, (176); Chiou et al., 1994, (177); Wu & Wu, 1988, (178); Wu et al., 1994, (179); Zenke et al., 1990, (180); Wu et al., 1991, (181).

### Determination of a Therapeutically Effective Dose

[0394] The determination of a therapeutically effective dose is well within the capability of those skilled in the art A therapeutically effective dose refers to that amount of active ingredient which increases or decreases human “BREAST CANCER GENE” activity relative to the human “BREAST CANCER GENE” activity which occurs in the absence of the therapeutically effective dose.

[0395] For any compound, the therapeutically effective dose can be estimated initially either in cell culture assays or in animal models, usually mice, rabbits, dogs, or pigs. The animal model also can be used to determine the appropriate concentration range and route of administration. Such information can then be used to determine useful doses and routes for administration in humans.

[0396] Therapeutic efficacy and toxicity, e.g., ED₅₀ (the dose therapeutically effective in 50% of the population) and LD₅₀ (the dose lethal to 50% of the population), can be determined by standard pharmaceutical procedures in cell cultures or experimental animals. The dose ratio of toxic to therapeutic effects is the therapeutic index, and it can be expressed as the ratio, LD₅₀/ED₅₀.

[0397] Pharmaceutical compositions which exhibit large therapeutic indices are preferred. The data obtained from cell culture assays and animal studies is used in formulating a range of dosage for human use. The dosage contained in such compositions is preferably within a range of circulating concentrations that include the ED₅₀ with little or no toxicity. The dosage varies within this range depending upon the dosage form employed, sensitivity of the patient, and the route of administration.

[0398] The exact dosage will be determined by the practitioner, in light of factors related to the subject that requires treatment. Dosage and administration are adjusted to provide sufficient levels of the active ingredient or to maintain the desired effect. Factors which can be taken into account include the severity of the disease state, general health of the subject, age, weight, and gender of the subject, diet, time and frequency of administration, drug combination(s), reaction sensitivities, and tolerance/response to therapy. Long-acting pharmaceutical compositions can be administered every 3 to 4 days, every week, or once every two weeks depending on the half-life and clearance rate of the particular formulation.

[0399] Normal dosage amounts can vary from 0.1 to 100,000 micrograms, up to a total dose of about 1 g, depending upon the route of administration. Guidance as to particular dosages and methods of delivery is provided in the literature and generally available to practitioners in the art. Those skilled in the art will employ different formulations for nucleotides than for proteins or their inhibitors. Similarly, delivery of polynucleotides or polypeptides will be specific to particular cells, conditions, locations, etc.

[0400] If the reagent is a single-chain antibody, polynucleotides encoding the antibody can be constructed and introduced into a cell either ex vivo or in vivo using well-established techniques including, but not limited to, transferrin-polycation-mediated DNA transfer, transfection with naked or encapsulated nucleic acids, liposome-mediated cellular fusion, intracellular transportation of DNA-coated latex beads, protoplast fusion, viral infection, electroporation, a gene gun, and DEAE- or calcium phosphate-mediated transfection.

[0401] Effective in vivo dosages of an antibody are in the range of about 5 μg to about 50 μg/kg, about 50 μg to about 5 mg/kg, about 100 μg to about 500 μg/kg of patient body weight, and about 200 to about 250 μg/kg of patient body weight. For administration of polynucleotides encoding single-chain antibodies, effective in vivo dosages are in the range of about 100 ng to about 200 ng, 500 ng to about 50 mg, about 1 μg to about 2 mg, about 5 μg to about 500 μg, and about 20 μg to about 100 μg of DNA.

[0402] If the expression product is mRNA, the reagent is preferably an antisense oligonucleotide or a ribozyme. Polynucleotides which express antisense oligonucleotides or ribozymes can be introduced into cells by a variety of methods, as described above.

[0403] Preferably, a reagent reduces expression of a “BREAST CANCER GENE” gene or the activity of a “BREAST CANCER GENE” polypeptide by at least about 10, preferably about 50, more preferably about 75, 90, or 100% relative to the absence of the reagent. The effectiveness of the mechanism chosen to decrease the level of expression of a “BREAST CANCER GENE” gene or the activity of a “BREAST CANCER GENE” polypeptide can be assessed using methods well known in the art, such as hybridization of nucleotide probes to “BREAST CANCER GENE”-specific mRNA, quantitative RT-PCR, immunologic detection of a “BREAST CANCER GENE” polypeptide, or measurement of “BREAST CANCER GENE” activity.

[0404] In any of the embodiments described above, any of the pharmaceutical compositions of the invention can be administered in combination with other appropriate therapeutic agents. Selection of the appropriate agents for use in combination therapy can be made by one of ordinary skill in the art, according to conventional pharmaceutical principles. The combination of therapeutic agents can act synergistically to effect the treatment or prevention of the various disorders described above. Using this approach, one may be able to achieve therapeutic efficacy with lower dosages of each agent, thus reducing the potential for adverse side effects.

[0405] Any of the therapeutic methods described above can be applied to any subject in need of such therapy, including, for example, birds and mammals such as dogs, cats, cows, pigs, sheep, goats, horses, rabbits, monkeys, and most preferably, humans.

[0406] All patents and patent applications cited in this disclosure are expressly incorporated herein by reference. The above disclosure generally describes the present invention. A more complete understanding can be obtained by reference to the following specific examples which are provided for purposes of illustration only and are not intended to limit the scope of the invention.

### Pharmaceutical Compositions

[0407] The invention also provides pharmaceutical compositions which can be administered to a patient to achieve a therapeutic effect. Pharmaceutical compositions of the invention can comprise, for example, a “BREAST CANCER GENE” polypeptide, “BREAST CANCER GENE” polynucleotide, ribozymes or antisense oligonucleotides, antibodies which specifically bind to a “BREAST CANCER GENE” polypeptide, or mimetics, agonists, antagonists, or inhibitors of a “BREAST CANCER GENE” polypeptide activity. The compositions can be administered alone or in combination with at least one other agent, such as stabilizing compound, which can be administered in any sterile, biocompatible pharmaceutical carrier, including, but not limited to, saline, buffered saline, dextrose, and water. The compositions can be administered to a patient alone, or in combination with other agents, drugs or hormones.

[0408] In addition to the active ingredients, these pharmaceutical compositions can contain suitable pharmaceutically acceptable carriers comprising excipients and auxiliaries which facilitate processing of the active compounds into preparations which can be used pharmaceutically. Pharmaceutical compositions of the invention can be administered by any number of routes including, but not limited to, oral, intravenous, intramuscular, intraarterial, intramedullary, intrathecal, intraventricular, transdermal, subcutaneous, intraperitoneal, intranasal, parenteral, topical, sublingual, or rectal means. Pharmaceutical compositions for oral administration can be formulated using pharmaceutically acceptable carriers well known in the art in dosages suitable for oral administration. Such carriers enable the pharmaceutical compositions to be formulated as tablets, pills, dragees, capsules, liquids, gels, syrups, slurries, suspensions, and the like, for ingestion by the patient.

[0409] Pharmaceutical preparations for oral use can be obtained through combination of active compounds with solid excipient, optionally grinding a resulting mixture, and processing the mixture of granules, after adding suitable auxiliaries, if desired, to obtain tablets or dragee cores. suitable excipients are carbohydrate or protein fillers, such as sugars, including lactose, sucrose, mannitol, or sorbitol; starch from corn, wheat, rice, potato, or other plants; cellulose, such as methyl cellulose, hydroxypropylmethylcellulose, or sodium carboxymethylcellulose; gums including arabic and tragacanth; and proteins such as gelatin and collagen. If desired, disintegrating or solubilizing agents can be added, such as the cross-linked polyvinyl pyrrolidone, agar, alginic acid, or a salt thereof, such as sodium alginate.

[0410] Dragee cores can be used in conjunction with suitable coatings, such as concentrated sugar solutions, which also can contain gum arabic, talc, polyvinylpyrrolidone, carbopol gel, polyethylene glycol, and/or titanium dioxide, lacquer solutions, and suitable organic solvents or solvent mixtures. Dyestuffs or pigments can be added to the tablets or dragee coatings for product identification or to characterize the quantity of active compound, i.e., dosage.

[0411] Pharmaceutical preparations which can be used orally include push-fit capsules made of gelatin, as well as soft, sealed capsules made of gelatin and a coating, such as glycerol or sorbitol. Push-fit capsules can contain active ingredients mixed with a filler or binders, such as lactose or starches, lubricants, such as talc or magnesium stearate, and, optionally, stabilizers. In soft capsules, the active compounds can be dissolved or suspended in suitable liquids, such as fatty oils, liquid, or liquid polyethylene glycol with or without stabilizers.

[0412] Pharmaceutical formulations suitable for parenteral administration can be formulated in aqueous solutions, preferably in physiologically compatible buffers such as Hanks' solution, Ringer's solution, or physiologically buffered saline. Aqueous injection suspensions can contain substances which increase the viscosity of the suspension, such as sodium carboxymethyl cellulose, sorbitol, or dextran. Additionally, suspensions of the active compounds can be prepared as appropriate oily injection suspensions. Suitable lipophilic solvents or vehicles include fatty oils such as sesame oil, or synthetic fatty acid esters, such as ethyl oleate or triglycerides, or liposomes. Non-lipid polycationic amino polymers also can be used for delivery. Optionally, the suspension also can contain suitable stabilizers or agents which increase the solubility of the compounds to allow for the preparation of highly concentrated solutions. For topical or nasal administration, penetrants appropriate to the particular barrier to be permeated are used in the formulation. Such penetrants are generally known in the art.

[0413] The pharmaceutical compositions of the present invention can be manufactured in a manner that is known in the art, e.g., by means of conventional mixing, dissolving, granulating, dragee making, levigating, emulsifying, encapsulating, entrapping, or lyophilizing processes. The pharmaceutical composition can be provided as a salt and can be formed with many acids, including but not limited to, hydrochloric, sulfuric, acetic, lactic, tartaric, malic, succinic, etc. Salts tend to be more soluble in aqueous or other protonic solvents than are the corresponding free base forms. In other cases, the preferred preparation can be a lyophilized powder which can contain any or all of the following: 150 mM histidine, 0.1%2% sucrose, and 27% mannitol, at a pH range of 4.5 to 5.5, that is combined with buffer prior to use.

[0414] Further details on techniques for formulation and administration can be found in the latest edition of REMINGTON'S PHARMACEUTICAL SCIENCES (182). After pharmaceutical compositions have been prepared, they can be placed in an appropriate container and labeled for treatment of an indicated condition. Such labeling would include amount, frequency, and method of administration.

### Material and Methods

[0415] One strategy for identifying genes that are involved in breast cancer is to detect genes that are expressed differentially under conditions associated with the disease versus non-disease conditions. The sub-sections below describe a number of experimental systems which may be used to detect such differentially expressed genes. In general, these experimental systems include at least one experimental condition in which subjects or samples are treated in a manner associated with breast cancer, in addition to at least one experimental control condition lacking such disease associated treatment. Differentially expressed genes are detected, as described below, by comparing the pattern of gene expression between the experimental and control conditions.

[0416] Once a particular gene has been identified through the use of one such experiment, its expression pattern may be further characterized by studying its expression in a different experiment and the findings may be validated by an independent technique. Such use of multiple experiments may be useful in distinguishing the roles and relative importance of particular genes in breast cancer. A combined approach, comparing gene expression pattern in cells derived from breast cancer patients to those of in vitro cell culture models can give substantial hints on the pathways involved in development and/or progression of breast cancer.

[0417] Among the experiments which may be utilized for the identification of differentially expressed genes involved in malignant neoplasia and breast cancer, for example, are experiments designed to analyze those genes which are involved in signal transduction. Such experiments may serve to identify genes involved in the proliferation of cells.

[0418] Below are methods described for the identification of genes which are involved in breast cancer. Such represent genes which are differentially expressed in breast cancer conditions relative to their expression in normal, or non-breast cancer conditions or upon experimental manipulation based on clinical observations. Such differentially expressed genes represent “target” and/or “marker” genes. Methods for the further characterization of such differentially expressed genes, and for their identification as target and/or marker genes, are presented below.

[0419] Alternatively, a differentially expressed gene may have its expression modulated, i.e., quantitatively increased or decreased, in normal versus breast cancer states, or under control versus experimental conditions. The degree to which expression differs in normal versus breast cancer or control versus experimental states need only be large enough to be visualized via standard characterization techniques, such as, for example, the differential display technique described below. Other such standard characterization techniques by which expression differences may be visualized include but are not limited to quantitative RT-PCR and Northern analyses, which are well known to those of skill in the art.

[0420] As part of this invention, a method is described by way of illustration and not by limitation, displaying at least some of the below mentioned aspects:
[0421] 1. A method for the prediction, diagnosis or prognosis of malignant neoplasia by the detection of at least 2 markers characterized in that the markers are genes and fragments thereof or genomic nucleic acid sequences that are located on one chromosomal region which is altered in malignant neoplasia.
[0422] 2. A method for the prediction, diagnosis or prognosis of malignant neoplasia by the detection of at least 2 markers characterized in that the markers are:
   [0423] a) genes that are located on one or more chromosomal region(s) which is/are altered in malignant neoplasia; and
   [0424] b)
      [0425] i) receptor and ligand; or
      [0426] ii) members of the same signal transduction pathway; or
      [0427] iii) members of synergistic signal transduction pathways; or
      [0428] iv) members of antagonistic signal transduction pathways; or
      [0429] v) transcription factor and transcription factor binding site.
[0430] 3. The method of aspect 1 or 2 wherein the malignant neoplasia is breast cancer, ovarian cancer, gastric cancer, colon cancer, esophageal cancer, mesenchymal cancer, bladder cancer or non-small cell lung cancer.
[0431] 4. The method of aspect 1 or 2 wherein at least one chromosomal region is defined as the cytogenetic region: 1p13, 1q32, 3p21-p24, 5p13-p14, 8q23-q24, 11q13, 12q13, 17q12-q24 or 20q13.
[0432] 5. The method of aspect 1 or 2 wherein at least chromosomal region is defined as the cytogenetic region 17q11.2-21.3 and the malignant neoplasia is breast cancer, ovarian cancer, gastric cancer, colon cancer, esophageal cancer, mesenchymal cancer, bladder cancer or non-small cell lung cancer.
[0433] 6. The method of aspect 1 or 2 wherein at least one chromosomal region is defined as the cytogenetic region 3p21-24 and the malignant neoplasia is breast cancer, ovarian cancer, gastric cancer, colon cancer, esophageal cancer, mesenchymal cancer, bladder cancer or non-small cell lung cancer.
[0434] 7. The method of aspect 1 or 2 wherein at least one chromosomal region is defined as the cytogenetic region 12q13 and the malignant neoplasia is breast cancer, ovarian cancer, gastric cancer, colon cancer, esophageal cancer, mesenchymal cancer, bladder cancer or non-small cell lung cancer.
[0435] 8. A method for the prediction, diagnosis or prognosis of malignant neoplasia by the detection of at least one marker whereby the marker is a VNTR, SNP, RFLP or STS characterized in that the marker is located on one chromosomal region which is altered in malignant neoplasia due to amplification and the marker is detected in a cancerous and a non-cancerous tissue or biological sample of the same individual.
[0436] 9. The method of aspect 8 wherein the marker is selected from the group consisting of the VNTRS:
   [0437] D17S946, D17S1181, D17S2026, D17S838, D17S250, D17S1818, D17S614, D17S2019, D17S608, D17S1655, D17S2147, D17S754, D17S1814, D17S2007, D17S1246, D17S1979, D17S1984, D17S1984, D17S1867, D17S1788, D17S1836, D17S1787, D17S1660, D17S2154, D17S1955, D17S2098, D17S518, D17S1851, D11S4358, D17S964, D19S1091, D17S1179, D10S2160, D17S1230, D17S1338, D17S2011, D17S1237, D17S2038, D17S2091, D17S649, D17S1190 and M87506.
[0438] 10. The method of aspect 8 wherein the marker is selected from the group consisting of the SNPs:
rs2230698, rs2230700, rs1058808, rs1801200, rs903506, rs2313170, rs1136201, rs2934968, rs2172826, rs1810132, rs1801201, rs2230702, rs2230701, rs1126503, rs3471, rs13695, rs471692, rs558068, rs1064288, rs1061692, rs520630, rs782774, rs565121, rs2586112, rs532299, rs2732786, rs1804539, rs1804538, rs1804537, rs1141364, rs12231, rs1132259, rs1132257, rs1132256, rs1132255, rs1132254, rs1132252, rs1132268 and rs1132258
[0439] 11. A method for the prediction, diagnosis or prognosis of malignant neoplasia by the detection of at least one marker characterized in that the marker is selected from:
   [0440] a) a polynucleotide or polynucleotide analog comprising at least one of the sequences of SEQ ID NO: 2 to 6, 8, 9, 11 to 16, 18, 19, 21 to 26, 53 to 75, or 315 to 318;
   [0441] b) a polynucleotide or polynucleotide analog which hybridizes under stringent conditions to a polynucleotide specified in (a) and encodes a polypeptide exhibiting the same biological function as specified for the respective sequence in Table 2 or 3
   [0442] c) a polynucleotide or polynucleotide analog the sequence of which deviates from the polynucleotide specified in (a) and (c) due to the generation of the genetic code encoding a polypeptide exhibiting the same biological function as specified for the respective sequence in Table 2 or 3
   [0443] d) a polynucleotide or polynucleotide analog which represents a specific fragment, derivative or allelic variation of a polynucleotide sequence specified in (a) to (d)
   [0444] e) a purified polypeptide encoded by a polynucleotide or polynucleotide analog sequence specified in (a) to (e)
   [0445] f) A purified polypeptide comprising at least one of the sequences of SEQ ID NO: 28 to 32, 34, 35, 37 to 42, 44, 45, 47 to 52, 76 to 98, or 393 to 396; are detected.
[0446] 12. A method for the prediction, diagnosis or prognosis of malignant neoplasia by the detection of at least 2 markers characterized in that at least 2 markers are selected from:
   [0447] a) polynucleotide or polynucleotide analog comprising at least one of the sequences of SEQ ID NO: 1 to 26 or 53 to 75 or 315 to 318;
   [0448] b) a polynucleotide or polynucleotide analog which hybridizes under stringent conditions to a polynucleotide specified in (a) and encodes a polypeptide exhibiting the same biological function as specified for the respective sequence in Table 2 or 3
   [0449] c) a polynucleotide or polynucleotide analog the sequence of which deviates from the polynucleotide specified in (a) and (b) due to the generation of the genetic code encoding a polypeptide exhibiting the same biological function as specified for the respective sequence in Table 2 or 3
   [0450] d) a polynucleotide or polynucleotide analog which represents a specific fragment, derivative or allelic variation of a polynucleotide sequence specified in (a) to (c)
   [0451] e) a purified polypeptide encoded by a polynucleotide sequence or polynucleotide analog specified in (a) to (d)
   [0452] f) a purified polypeptide comprising at least one of the sequences of SEQ ID NO: 27 to 52 or 76 to 98 or 393 to 396
   [0453] are detected.
[0454] 13. The method of any of the aspects 1 or 12 wherein the detection method comprises the use of PCR, arrays or beads.
[0455] 14. A diagnostic kit comprising instructions for conducting the method of any of aspects 1 to 13.
[0456] 15. A composition for the prediction, diagnosis or prognosis of malignant neoplasia comprising:
   [0457] a) a detection agent for:
      [0458] i) any polynucleotide or polynucleotide analog comprising at least one of the sequences of SEQ ID NO: 2 to 6, 8, 9, 11 to 16, 18, 19, 21 to 26, 53 to 75, or 315 to 318,
      [0459] ii) any polynucleotide or polynucleotide analog which hybridizes under stringent conditions to a polynucleotide specified in (a) encoding a polypeptide exhibiting the same biological function as specified for the respective sequence in Table 2 or 3
      [0460] iii) a polynucleotide or polynucleotide analog the sequence of which deviates from the polynucleotide specified in (a) and (b) due to the generation of the genetic code encoding a polypeptide exhibiting the same biological function as specified for the respective sequence in Table 2 or 3
      [0461] iv) a polynucleotide or polynucleotide analog which represents a specific fragment, derivative or allelic variation of a polynucleotide sequence specified in (a) to (c)
      [0462] v) a polypeptide encoded by a polynucleotide or polynucleotide analog sequence specified in (a) to (d);
      [0463] vi) a polypeptide comprising at least one of the sequences of SEQ ID NO: 28 to 32, 34, 35, 37 to 42, 44, 45, 47 to 52, 76 to 98, or 393 to 396.
   [0464] or
   [0465] b) at least 2 detection agents for at least 2 markers selected from:
      [0466] i) any polynucleotide comprising at least one of the sequences of SEQ ID NO: 1 to 26 or 53 to 75 or 315 to 318;
      [0467] ii) any polynucleotide which hybridizes under stringent conditions to a polynucleotide specified in (a) encoding a polypeptide exhibiting the same biological function as specified for the respective sequence in Table 2 or 3
      [0468] iii) a polynucleotide the sequence of which deviates from the polynucleotide specified in (a) and (b) due to the generation of the genetic code encoding a polypeptide exhibiting the same biological function as specified for the respective sequence in Table 2 or 3
      [0469] iv) a polynucleotide which represents a specific fragment, derivative or allelic variation of a polynucleotide sequence specified in (a) to (c)
      [0470] v) a polypeptide encoded by a polynucleotide sequence specified in (a) to (d);
      [0471] vi) a polypeptide comprising at least one of the sequences of SEQ ID NO: 27 to 52 or 76 to 98 or 393 to 396.
[0472] 16. An array comprising a plurality of polynucleotides or polynucleotide analogs wherein each of the polynucleotides is selected from:
   [0473] a) a polynucleotide or polynucleotide analog comprising at least one of the sequences of SEQ ID NO: 1 to 26 or 53 to 75 or 315 to 318;
   [0474] b) a polynucleotide or polynucleotide analog which hybridizes under stringent conditions to a polynucleotide specified in (a) encoding a polypeptide exhibiting the same biological function as specified for the respective sequence in Table 2 or 3
   [0475] c) a polynucleotide or polynucleotide analog the sequence of which deviates from the polynucleotide specified in (a) and (b) due to the generation of the genetic code encoding a polypeptide exhibiting the same biological function as specified for the respective sequence in Table 2 or 3
   [0476] d) a polynucleotide or polynucleotide analog which represents a specific fragment, derivative or allelic variation of a polynucleotide sequence specified in (a) to (c)
   [0477] attached to a solid support.
[0478] 17. A method of screening for agents which regulate the activity of a polypeptide encoded by a polynucleotide or polynucleotide analog selected from the group consisting of:
   [0479] a) a polynucleotide or polynucleotide analog comprising at least one of the sequences of SEQ ID NO:2 to 6, 8, 9, 11 to 16, 18, 19, 21 to 26, 53 to 75 or 315 to 318;
   [0480] b) a polynucleotide or polynucleotide analog which hybridizes under stringent conditions to a polynucleotide specified in (a) encoding a polypeptide exhibiting the same biological function as specified for the respective sequence in Table 2 or 3
   [0481] c) a polynucleotide or polynucleotide analog the sequence of which deviates from the polynucleotide specified in (a) and (b) due to the generation of the genetic code encoding a polypeptide exhibiting the same biological function as specified for the respective sequence in Table 2 or 3
   [0482] d) a polynucleotide or polynucleotide analog which represents a specific fragment, derivative or allelic variation of a polynucleotide sequence specified in (a) to (c);
   [0483] comprising the steps of:
   [0484] i) contacting a test compound with at least one polypeptide encoded by a polynucleotide specified in (a) to (d); and
   [0485] ii) detecting binding of the test compound to the polypeptide, wherein a test compound which binds to the polypeptide is identified as a potential therapeutic agent for modulating the activity of the polypeptide in order to prevent of treat malignant neoplasia.
[0486] 18. A method of screening for agents which regulate the activity of a polypeptide encoded by a polynucleotide or polynucleotide analog selected from the group consisting of:
   [0487] a) a polynucleotide or polynucleotide analog comprising at least one of the sequences of SEQ ID NO: 2 to 6, 8, 9, 11 to 16, 18, 19, 21 to 26, 53 to 75, or 315 to 318;
   [0488] b) a polynucleotide or polynucleotide analog which hybridizes under stringent conditions to a polynucleotide specified in (a) encoding a polypeptide exhibiting the same biological function as specified for the respective sequence in Table 2 or 3
   [0489] c) a polynucleotide or polynucleotide analog the sequence of which deviates from the polynucleotide specified in (a) and (b) due to the generation of the genetic code encoding a polypeptide exhibiting the same biological function as specified for the respective sequence in Table 2 or 3
   [0490] d) a polynucleotide or polynucleotide analog which represents a specific fragment, derivative or allelic variation of a polynucleotide sequence specified in (a) to (c)
   [0491] comprising the steps of:
   [0492] i) contacting a test compound with at least one polypeptide encoded by a polynucleotide specified in (a) to (d); and
   [0493] ii) detecting the activity of the polypeptide as specified for the respective sequence in Table 2 or 3, wherein a test compound which increases the activity is identified as a potential preventive or therapeutic agent for increasing the polypeptide activity in malignant neoplasia, and wherein a test compound which decreases the activity of the polypeptide is identified as a potential therapeutic agent for decreasing the polypeptide activity in malignant neoplasia.
[0494] 19. A method of screening for agents which regulate the activity of a polynucleotide or polynucleotide analog selected from group consisting of;
   [0495] a) a polynucleotide or polynucleotide analog comprising at least one of the sequences of SEQ ID NO: 2 to 6, 8, 9, 11 to 16, 18, 19, 21 to 26, 53 to 75 or 315 to 318;
   [0496] b) a polynucleotide or polynucleotide analog which hybridizes under stringent conditions to a polynucleotide specified in (a) encoding a polypeptide exhibiting the same biological function as specified for the respective sequence in Table 2 or 3
   [0497] c) a polynucleotide or polynucleotide analog the sequence of which deviates from the polynucleotide specified in (a) and (b) due to the generation of the genetic code encoding a polypeptide exhibiting the same biological function as specified for the respective sequence in Table 2 or 3
   [0498] d) a polynucleotide or polynucleotide analog which represents a specific fragment, derivative or allelic variation of a polynucleotide sequence specified in (a) to (c)
   [0499] comprising the steps of:
   [0500] i) contacting a test compound with at least one polynucleotide or polynucleotide analog specified in (a) to (d), and
   [0501] ii) detecting binding of the test compound to the polynucleotide, wherein a test compound which binds to the polynucleotide is identified as a potential preventive or therapeutic agent for regulating the activity of the polynucleotide in malignant neoplasia.
[0502] 20. Use of
   [0503] a) a polynucleotide or polynucleotide analog comprising at least one of the sequences of SEQ ID NO: 2 to 6, 8, 9, 11 to 16, 18, 19, 21 to 26, 53 to 75 or 315 to 318;
   [0504] b) a polynucleotide which hybridizes under stringent conditions to a polynucleotide or polynucleotide analog specified in (a) encoding a polypeptide exhibiting the same biological function as specified for the respective sequence in Table 2 or 3;
   [0505] c) a polynucleotide or polynucleotide analog the sequence of which deviates from the polynucleotide specified in (a) and (b) due to the generation of the genetic code encoding a polypeptide exhibiting the same biological function as specified for the respective sequence in Table 2 or 3;
   [0506] d) a polynucleotide or polynucleotide analog which represents a specific fragment, derivative or allelic variation of a polynucleotide sequence specified in (a) to (c);
   [0507] e) an antisense molecule targeting specifically one of the polynucleotide sequences specified in (a) to (d);
   [0508] f) a purified polypeptide encoded by a polynucleotide or polynucleotide analog sequence specified in (a) to (d)
   [0509] g) a purified polypeptide comprising at least one of the sequences of SEQ ID NO: 28 to 32, 34, 35, 37 to 42, 44, 45, 47 to 52, 76 to 98 or 393 to 396;
   [0510] h) an antibody capable of binding to one of the polynucleotide specified in (a) to (d) or a polypeptide specified in (f) and (g);
   [0511] i) a reagent identified by any of the methods of aspect 17 to 19 that modulates the amount or activity of a polynucleotide sequence specified in (a) to (d) or a polypeptide specified in (f) and (g);
   [0512] in the preparation of a composition for the prevention, prediction, diagnosis, prognosis or a medicament for the treatment of malignant neoplasia.
[0513] 21. Use of aspect 20 wherein the disease is breast cancer.
[0514] 22. A reagent that regulates the activity of a polypeptide selected from the group consisting of:
   [0515] a) a polypeptide encoded by any polynucleotide or polynucleotide analog comprising at least one of the sequences of SEQ ID NO: 2 to 6, 8, 9, 11 to 16, 18, 19, 21 to 26, 53 to 75 or 315 to 318;
   [0516] b) a polypeptide encoded by any polynucleotide or polynucleotide analog which hybridizes under stringent conditions to any polynucleotide comprising at least one of the sequences of SEQ ID NO: 2 to 6, 8, 9, 11 to 16, 18, 19, 21 to 26, 53 to 75 or 315 to 318 encoding a polypeptide exhibiting the same biological function as specified for the respective sequence in Table 2 or 3
   [0517] c) a polypeptide encoded by any polynucleotide or polynucleotide analog the sequence of which deviates from the polynucleotide specified in (a) and (b) due to the generation of the genetic code encoding a polypeptide exhibiting the same biological function as specified for the respective sequence in Table 2 or 3
   [0518] d) a polypeptide encoded by any polynucleotide or polynucleotide analog which represents a specific fragment, derivative or allelic variation of a polynucleotide sequence specified in (a) to (c) encoding a polypeptide exhibiting the same biological function as specified for the respective sequence in Table 2 or 3
   [0519] e) or a polypeptide comprising at least one of the sequences of SEQ ID NO: 28 to 32, 34, 35, 37 to 42, 44, 45, 47 to 52, 76 to 98 or 393 to 396;
   [0520] wherein said reagent is identified by the method of any of the aspects 17 to 19.
[0521] 23. A reagent that regulates the activity of a polynucleotide or polynucleotide analog selected from the group consisting of:
   [0522] a) a polynucleotide or polynucleotide analog comprising at least one of the sequences SEQ ID NO:2 to 6, 8, 9, 11 to 16, 18, 19, 21 to 26, 53 to 75 or 315 to 318;
   [0523] b) a polynucleotide or polynucleotide analog which hybridizes under stringent conditions to a polynucleotide specified in (a) encoding a polypeptide exhibiting the same biological function as specified for the respective sequence in Table 2 or 3
   [0524] c) a polynucleotide or polynucleotide analog the sequence of which deviates from the polynucleotide specified in (a) and (b) due to the generation of the genetic code encoding a polypeptide exhibiting the same biological function as specified for the respective sequence in Table 2 or 3
   [0525] d) a polynucleotide or polynucleotide analog which represents a specific fragment, derivative or allelic variation of a polynucleotide sequence specified in (a) to (c) encoding a polypeptide exhibiting the same biological function as specified for the respective sequence in Table 2 or 3
   [0526] wherein said reagent is identified by the method of any of the aspects 17 to 19.
[0527] 24. A pharmaceutical composition, comprising:
   [0528] a) an expression vector containing at least one polynucleotide or polynucleotide analog selected from the group consisting of:
      [0529] i) a polynucleotide or polynucleotide analog comprising at least one of the sequences of SEQ ID NO: 2 to 6, 8, 9, 11 to 16, 18, 19, 21 to 26, 53 to 75 or 315 to 318;
      [0530] ii) a polynucleotide or polynucleotide analog which hybridizes under stringent conditions to a polynucleotide specified in (a) encoding a polypeptide exhibiting the same biological function as specified for the respective sequence in Table 2 or 3
      [0531] iii) a polynucleotide or polynucleotide analog the sequence of which deviates from the polynucleotide specified in (a) and (b) due to the generation of the genetic code encoding a polypeptide exhibiting the same biological function as specified for the respective sequence in Table 2 or 3
      [0532] iv) a polynucleotide or polynucleotide analog which represents a specific fragment, derivative or allelic variation of a polynucleotide sequence specified in (a) to (c) encoding a polypeptide exhibiting the same biological function as specified for the respective sequence in Table 2 or 3;
   [0533] or the reagent of aspect 22 or 23 and a pharmaceutically acceptable carrier.
[0534] 25. A computer-readable medium comprising:
   [0535] a) at least one digitally encoded value representing a level of expression of at least one polynucleotide sequence of SEQ ID NO: 2 to 6, 8, 9, 11 to 16, 18, 19, 21 to 26, 53 to 75 or 315 to 318
   [0536] b) at least 2 digitally encoded values representing the levels of expression of at least 2 polynucleotide sequences selected from SEQ ID NO: 1 to 26, 53 to 75 or 315 to 318
   [0537] in a cell from the a subject at risk for or having malignant neoplasia.
[0538] 26. A method for the detection of chromosomal alterations characterized in that the relative abundance of individual mRNAs, encoded by genes, located in altered chromosomal regions is detected.
[0539] 27. A method for the detection of chromosomal alterations characterized in that the copy number of one or more chromosomal region(s) is detected by quantitative PCR.

### EXAMPLE 1

### Expression Profiling

[0540] a) Expression Profiling Utilizing Quantitative RT-PCR

[0541] For a detailed analysis of gene expression by quantitative PCR, methods, one will utilize primers flanking the genomic region of interest and a fluorescent labeled probe hybridizing in-between. Using the PRISM 7700 Sequence Detection System of PE Applied Biosystems (Perkin Elmer, Foster City, Calif., USA) with the technique of a fluorogenic probe, consisting of an oligonucleotide labeled with both a fluorescent reporter dye and a quencher dye, one can perform such a expression measurement. Amplification of the probe-specific product causes cleavage of the probe, generating an increase in reporter fluorescence. Primers and probes were selected using the Primer Express software and localized mostly in the 3′ region of the coding sequence or in the 3′ untranslated region (see Table 5 for primer- and probe-sequences) according to the relative positions of the probe sequence used for the construction of the Affymetrix HG_U95A-E or HG-U133A-B DNA-chips. All primer pairs were checked for specificity by conventional PCR reactions. To standardize the amount of sample RNA, GAPDH was selected as a reference, since it was not differentially regulated in the samples analyzed. TaqMan validation experiments were performed showing that the efficiencies of the target and the control amplifications are approximately equal which is a prerequisite for the relative quantification of gene expression by the comparative ΔΔC_{T} method, known to those with skills in the art.

[0542] As well as the technology provided by Perkin Elmer one may use other technique implementations like Lightcycler™ from Roche Inc. or iCycler from Stratagene Inc.

b) Expression Profiling Utilizing DNA Microarrays

[0543] Expression profiling can bee carried out using the Affymetrix Array Technology. By hybridization of mRNA to such a DNA-array or DNA-Chip, it is possible to identify the expression value of each transcripts due to signal intensity at certain position of the array. Usually these DNA-arrays are produced by spotting of cDNA, oligonucleotides or subcloned DNA fragments. In case of Affymetrix technology app. 400.000 individual oligonucleotide sequences were synthesized on the surface of a silicon wafer at distinct positions. The minimal length of oligomers is 12 nucleotides, preferable 25 nucleotides or full length of the questioned transcript. Expression profiling may also be carried out by hybridization to nylon or nitro-cellulose membrane bound DNA or oligonucleotides. Detection of signals derived from hybridization may be obtained by either colorimetric, fluorescent, electrochemical, electronic, optic or by radioactive readout. Detailed description of array construction have been mentioned above and in other patents cited. To determine the quantitative and qualitative changes in the chromosomal region to analyze, RNA from tumor tissue which is suspected to contain such genomic alterations has to be compared to RNA extracted from benign tissue (e.g. epithelial breast tissue, or micro dissected ductal tissue) on the basis of expression profiles for the whole transcriptome. With minor modifications, the sample preparation protocol followed the Affymetrix GeneChip Expression Analysis Manual (Santa Clara, Calif.). Total RNA extraction and isolation from tumor or benign tissues, biopsies, cell isolates or cell containing body fluids can be performed by using TRIzol (Life Technologies, Rockville, Md.) and Oligotex mRNA Midi kit (Qiagen, Hilden, Germany), and an ethanol precipitation step should be carried out to bring the concentration to 1 mg/ml. Using 5-10 mg of mRNA to create double stranded cDNA by the SuperScript system (Life Technologies). First strand cDNA synthesis was primed with a T7-(dT24) oligonucleotide. The cDNA can be extracted with phenol/chloroform and precipitated with ethanol to a final concentration of 1 mg/ml. From the generated cDNA, CRNA can be synthesized using Enzo's (Enzo Diagnostics Inc., Farmingdale, N.Y.) in vitro Transcription Kit. Within the same step the cRNA can be labeled with biotin nucleotides Bio-11-CTP and Bio-16-UTP (Enzo Diagnostics Inc., Farmingdale, N.Y.). After labeling and cleanup (Qiagen, Hilden (Germany) the cRNA then should be fragmented in an appropriated fragmentation buffer (e.g., 40 mM Tris-Acetate, pH 8.1, 100 mM KOAc, 30 mM MgOAc, for 35 minutes at 94° C.). As per the Affymetrix protocol, fragmented cRNA should be hybridized on the HG_U133 arrays A and B, comprising app. 40.000 probed transcripts each, for 24 hours at 60 rpm in a 45° C. hybridization oven. After Hybridization step the chip surfaces have to be washed and stained with streptavidin phycoerythrin (SAPE; Molecular Probes, Eugene, Oreg.) in Affymetrix fluidics stations. To amplify staining, a second labeling step can be introduced, which is recommended but not compulsive. Here one should add SAPE solution twice with an antistreptavidin biotinylated antibody. Hybridization to the probe arrays may be detected by fluorometric scanning (Hewlett Packard Gene Array Scanner; Hewlett Packard Corporation, Palo Alto, Calif.).

[0544] After hybridization and scanning, the microarray images can be analyzed for quality control, looking for major chip defects or abnormalities in hybridization signal. Therefor either Affymetrix GeneChip MAS 5.0 Software or other microarray image analysis software can be utilized. Primary data analysis should be carried out by software provided by the manufacturer.

[0545] In case of the genes analyses in one embodiment of this invention the primary data have been analyzed by further bioinformatic tools and additional filter criteria. The bioinformatic analysis is described in detail below.

c) Data Analysis

[0546] According to Affymetrix measurement technique (Affymetrix GeneChip Expression Analysis Manual, Santa Clara, Calif.) a single gene expression measurement on one chip yields the average difference value and the absolute call. Each chip contains 16-20 oligonucleotide probe pairs per gene or cDNA clone. These probe pairs include perfectly matched sets and mismatched sets, both of which are necessary for the calculation of the average difference, or expression value, a measure of the intensity difference for each probe pair, calculated by subtracting the intensity of the mismatch from the intensity of the perfect match. This takes into consideration variability in hybridization among probe pairs and other hybridization artifacts that could affect the fluorescence intensities. The average difference is a numeric value supposed to represent the expression value of that gene. The absolute call can take the values ‘A’ (absent), ‘M’ (marginal), or ‘P’ (present) and denotes the quality of a single hybridization. We used both the quantitative information given by the average difference and the qualitative information given by the absolute call to identify the genes which are differentially expressed in biological samples from individuals with breast cancer versus biological samples from the normal population. With other algorithms than the Affymetrix one we have obtained different numerical values representing the same expression values and expression differences upon comparison.

[0547] The differential expression E in one of the breast cancer groups compared to the normal population is calculated as follows. Given n average difference values d₁, d₂, . . . , dₙ in the breast cancer population and m average difference values c₁, c₂, . . . , cₘ in the population of normal individuals, it is computed by the equation:

$$E ≡ exp ( \frac{1}{m} {\sum }_{i = 1}^{m} ln ( {c}_{i} ) - \frac{1}{n} {\sum }_{i = 1}^{n} ln ( {d}_{i} ) )$$

[0548] If dⱼ<50 or cᵢ<50 for one or more values of i and j, these particular values cᵢ and/or dⱼ are set to an “artificial” expression value of 50. These particular computation of E allows for a correct comparison to TaqMan results.

[0549] A gene is called up-regulated in breast cancer versus normal if E≧1.5 and if the number of absolute calls equal to ‘P’ in the breast cancer population is greater than n/2.

[0550] A gene is called down-regulated in breast cancer versus normal if E≦1.5 and if the number of absolute calls equal to ‘P’ in the normal population is greater than m/2.

[0551] The final list of differentially regulated genes consists of all up-regulated and all down-regulated genes in biological samples from individuals with breast cancer versus biological samples from the normal population. Those genes on this list which are interesting for a pharmaceutical application were finally validated by TaqMan. If a good correlation between the expression values/behavior of a transcript could be observed with both techniques, such a gene is listed in Tables 1 to 3.

[0552] Since not only the information on differential expression of a single gene within an identified ARCHEON, but also the information on the co-regulation of several members is important for predictive, diagnostic, preventive and therapeutic purposes we have combined expression data with information on the chromosomal position (e.g. golden path) taken from public available databases to develop a picture of the overall transcription of a given tumor sample. By this technique not only known or suspected regions of genomes can be inspected but even more valuable, new regions of disregulation with chromosomal linkage can be identified. This is of value in other types of neoplasia or viral integration and chromosomal rearrangements. By SQL based database searches one can retrieve information on expression, qualitative value of a measurement (denoted by Affymetrix MAS 5.0 Software), expression values derived from other techniques than DNA-chip hybridization and chromosomal linkage.

### EXAMPLE 2

### Identification of the ARCHEON

[0553] a) Identification and Localization of Genes or Gene Probes (Represented by the so Called Probe Sets on Affymetrix Arrays Hg-U95A-E or Hg-U133A-B) in their Chromosomal Context and Order on the Human Genome.

[0554] For identification of larger chromosomal changes or aberrations, as they have been described in detail above, a sufficient number of genes, transcripts or DNA-fragments is needed. The density of probes covering a chromosomal region is not necessarily limited to the transcribed genes, in case of the use of array based CGH but by utilizing RNA as probe material the density is given by the distance of genes on a chromosome. The DNA-microarrays provided by Affymetrix Inc. Do contain hitherto all transcripts from the known humane genome, which are be represented by 40.000-60.000 probe sets. By BLAST mapping and sorting the sequences of these short DNA-oligomers to the public available sequence of the human genome represented by the so called “golden path”, available at the university of California in Santa Cruz or from the NCBI, a chromosomal display of the whole Transcriptome of a tissue specimen evolves. By graphical display of the individual chromosomal regions and color coding of over or under represented transcripts, compared to a reference transcriptome regions with DNA gains and losses can be identified.

b) Quantification of Gene Copy Numbers by Combined IHC and Quantitative PCR (PCR Karyotyping) or Directly by Quantitative PCR

[0555] Usually one to three paraffin-embedded tissue sections that are 5 μm thick are used to obtain genomic DNA from the samples. Tissue section are stained by colorimetric IHC after deparaffinization to identify regions containing disease associated cells. Stained regions are macrodissected with a scalpel and transferred into a micro-centrifuge tube. The genomic DNA of these isolated tissue sections is extracted using appropriate buffers. The isolated DNA is then used for quantitative PCR with appropriate primers and probes. Optionally the IHC staining can be omitted and the genomic DNA can be directly isolated with or without prior deparaffinization with appropriate buffers. Those who are skilled in the art may vary the conditions and buffers described below to obtain equivalent results.

[0556] Reagents from DAKO (HercepTest Code No. K 5204) and TaKaRa were used (Biomedicals Cat.: 9091) according to the manufactures protocol.

[0557] It is convenient to prepare the following reagents prior to staining:

### Solution No. 7

[0558] Epitope Retrieval Solution (Citrate buffer+antimicrobial agent) (10× conc.)

[0559] 20 ml ad 200 ml aqua dest. (stable for Imonth at 2-8° C.)

### Solution No. 8

[0560] Washing-buffer (Tris-HCl+antimicrobial agent) (10× conc.)

[0561] 30 ml ad 300 ml destined water (stable for 1 month at 2-8° C.)

Staining solution: DAB

[0562] 1 ml solution is sufficient for 10 slides. The solution were prepared immediately before usage:

[0563] 1 ml DAB buffer (Substrate Buffer solution, pH 7.5, containing H₂O₂, stabilizer, enhancers and an antimicrobial agent)+1 drop (25-3 μl) DAB-Chromogen (3,3′-diaminobenzidine chromogen solution). This solution is stable for up to 5 days at 2-8° C. Precipitated substances do not influence the staining result. Additionally required are: 2× approx. 100 ml Xylol, 2× approx. 100 ml Ethanol 100%, 2× Ethanol 95%, aqua dest. These solution can be used for up to 40 stainings. A water bath is required for the epitope retrieval step.

### Staining Procedure:

[0564] All reagents are pre-warmed to room temperature (20-25° C.) prior to immunostaining; Likewise all incubations were performed at room temperature. Except the epitope retrieval which is performed in at 95° C. water bath. Between the steps excess of liquid is tapped off from the slides with lintless tissue (Kim Wipe).

[0565] Deparaffinization

[0566] Slides are placed in a xylene bath and incubated for 5 minutes. The bath is changed and the step repeated once. Excess of liquid is tapped off and the slides are placed in absolute ethanol for 3 minutes. The bath is changed and the step repeated once. Excess of liquid is tapped off and the slides are placed in 95% ethanol for 3 minutes. The bath is changed and the step repeated once. Excess of liquid is tapped off and the slides are placed in distilled water for a minimum of 30 seconds.

### Epitone Retrival

[0567] Staining jars are filled with diluted epitope retrieval solution and preheated in a water bath at 95° C. The deparaffinized sections are immersed into the preheated solution in the staining jars and incubated for 40 minutes at 95° C. The entire jar is removed from the water bath and allowed to cool down at room temperature for 20 minutes. The epitope retrieval solution is decanted, the sections are rinsed in distilled water and finally soaked in wash buffer for 5 minutes.

### Peroxidase Blocking:

[0568] Excess of buffer is tapped off and the tissue section encircled with a DAKO pen. The specimen is covered with 3 drops (100 μl) Peroxidase-Blocking solution and incubated for 5 minutes. The slides are rinsed in distilled water and placed into a fresh washing buffer bath.

### Antibody Incubation

[0569] Excess of liquid is tapped off and the specimen are covered with 3 drops (100 μl) of Anti-Her-2/neu reagent (Rabbit Anti-Human Her2 Protein in 0.05 mol/L Tris/HCl, 0.1 mol/L NaCl, 15 mmol/L pH7.2 NaN₃ containing stabilizing protein) or negative control reagent (=IGG fraction of normal rabbit serum at an equivalent protein concentration as the Her2 Ab). After 30 minutes of incubation the slide is rinsed in water and placed into a fresh water bath.

### Visualization

[0570] Excess of liquid is tapped off and the specimen are covered with 3 drops (100 μl) of visualization reagent. After 30 minutes of incubation the slide is rinsed in water and placed into a fresh water bath. Excess of liquid is tapped off and the specimen are covered with 3 drops (100 μl) of Substrate-Chromogen solution (DAB) for 10 minutes. After rinsing the specimen with distalled water, photographs are taken with a conventional Olympus microscope to document the staining intensity and tumor regions within the specimen. Optionally a counterstain with hematoxylin was performed.

### DNA Extraction

[0571] The whole specimens or dissected subregions are transferred into a microcentrifuge tubes. Optionally a small amount (10 μl) of preheated TaKaRa solution (DEXPAT™) is preheated and placed onto the specimen to facilitate sample transfer with a scalpel. 50 to 150 μl of TaKaRa solution were added to the samples depending on the size of the tissue sample selected. The sample are incubated at 100° C. for 10 minutes in a block heater, followed by centrifugation at 12.000 rpm in a microcentrifuge. The supernatant is collected using a micropet and placed in a separate microcentrifuge tube. If no deparaffinization step has been undertaken one has to be sure not to withdraw tissue debris and resin. Genomic DNA left in the pellet can be collected by adding resin-free TaKaRa buffer and an additional heating and centrifugation step. Samples are stored at −20° C.

[0572] Genomic DNA from different tumor cell lines (MCF-7, BT-20, BT474, SKBR-3, AU-565, UACC-812, UACC-893, HCC-1008, HCC-2157, HCC-1954, HCC-2218, HCC-1937, HCC1599, SW480), or from lymphocytes is prepared with the QIAamp™ DNA Mini Kits or the QIAamp® DNA Blood Mini Kits according to the manufacturers protocol. Usually between 1 ng up to 1 μg DNA is used per reaction.

### Quantitative PCR

[0573] To measure the gene copy number of the genes within the patient samples the respective primer/probes (see table below) are prepared by mixing 25 μl of the 100 μM stock solution “Upper Primer”, 25 μl of the 100 μM stock solution “Lower Primer” with 12.5 μl of the 100 μM stock solution Taq Man Probe (Quencher Tamra) and adjusted to 500 μl with aqua dest. For each reaction 1.25 μl DNA-Extract of the patient samples or 1.25 μl DNA from the cell lines were mixed with 8.75 μl nuclease-free water and added to one well of a 96 Well-Optical Reaction Plate (Applied Biosystems Part No. 4306737). 1.5 μl Primer/Probe mix, 12, μl Taq Man Universal-PCR Mix (2×) (Applied Biosystems Part No. 4318157) and 1 μl Water are then added. The 96 well plates are closed with 8 Caps/Strips (Applied Biosystems Part Number 4323032) and centrifuged for 3 minutes. Measurements of the PCR reaction are done according to the instructions of the manufacturer with a TaqMan 7900 HT from Applied Biosystems (No. 20114) under appropriate conditions (2 min. 50° C., 10 min. 95° C., 0.15 min. 95° C., 1 min. 60° C.; 40 cycles). SoftwareSDS 2.0 from Applied Biosysrtems is used according to the respective instructions. CT-values are then further analyzed with appropriate software (Microsoft Excel™).

### EXAMPLE 3

[0574] Clinical Samples of patients being treated with Herceptin and a chemotherapeutic agent (e.g. docetaxel, paclitaxel, taxotere, carboplatin, cisplatin, oxaliplatin, vinorelbine) as a second line therapy have been obtained. These samples included formalin-fixed and paraffin-embedded material from primary tumours and metastatic lesions of the respective patients. However, the determination of the ARCHEON genes as disclosed in this invention, has also been performed from fresh tissue after nucleic acid extraction in an independent, neoadjuvant setting. Moreover, whole blood, serum and plasma samples were available for multiple patients.

[0575] Multiparametric, clinical assessment of the response to Herceptin in combination with chemotherapeutics (e.g. docetaxel, taxotere, paclitaxel, vinorelbine, carboplatin, cisplatin), or other therapies described below, was performed. Clinical information included histological parameters (INM-Stage, AJCC grade), standard molecular markers (IHC staining for estrogen receptor, progesteron receptor, Her-2/neu) and sonographical or radiological assessment (e.g. CT). Response to treatment was evaluated according to international standards, i.e. modified WHO criteria and RECIST criteria. Each cancer evaluation in the course of the disease was documented (method and date of evaluation, organ, anatomical description, measurability, size of lesion (longest diameter), greatest perpendicular diameter, tumor area). Moreover, each systemic anticancer therapy including prior chemotherapy with anthracyclins (Doxorubicin or Epirubicin) and/or CMF and the response thereto was evaluated (drug, intent, duration, schedule, number of cycles, cumulative dose). The response to combinatory treatment of metatstatic breast cancer patients with Herceptin and chemotherapeutica as second line treatment the modified WHO criteria were used. In addition the initial disease free survival, duration of response and time to progreesion were taken into consideration. For definition of treatment response standard criteria were used: “Complete Response” (“CR”=tumor shrinkage of 100% with no residual disease being clinical detectable), “Partial Response” (“PR”=tumor shrinkage of target lesion of at least 50%), “Stable Disease” (“SD”=tumor shrinkage of less than 50% or no change) and “Progressive Disease” (“PD” tumor growth or new tumor lesions).

[0576] More than 70 genes were analyzed according to the method disclosed in example 2 by combined IHC and quantitative PCR or directly by quantitative PCR after nucleic acid extraction from the formaldehyde-fixed, paraffin-embedded tissue slides. Results were reconfirmed by independent methodology (VNTR and SNP detection). Alterations of the 43 ARCHEON genes were determined by comparison with reference genes, that are located on the same chromosome (=intrachromosomal control,) or different chromosomes (=extrachromosomal control). Intrachromosomal reference genes included MMP28, hKa3 and K20. Extrachromosomal reference genes included GAPDH for chromosome 12. However any other gene not included in the ARCHEONs disclosed in this invention can be used as reference gene for ARCHEON characterization. The reference genes should be independent from the ARCHEON alterations occurring in the neoplastic lesions and should be not affected by chromosomal alterations such as amplifications and deletions. As gene copy numbers of non-amplified genes can be increased in neoplastic lesions due to genomic imbalances such as aneuploidie or polyploidie, each measurement of ARCHEON genes was correlated to multiple reference genes to minimize the influence of genomic imbalances on the relative copy number calculation. Moreover, minor systemic errors occurring due to differences in the performance of individual primer/probe pairs were minimized by determining primer/probe performances in control tissues (i.e. non-neoplastic tissues from healthy controls) and euploid control cell lines (e.g. HS68, ATCC #CRL1635). Moreover one well characterized, control cell line was used, that displays aneuploidie for a single chromosome (i.e. Detroit, ATCC#CCL-54; trisomie 21). By measuring genes located on the X-chromosome (e.g. SRY), the Y-chromosome (e.g. Xist) and on chromosome 21, defined copy numbers of 1, 2 and 3 genes could be determined as internal control during each run for standardization. In addition, synthetic targets were spiked into some reactions, that consisted of the target region of the PCR forward and reverse primers of the gene to be normalized, but in between consisted of a synthetic probe hybridization region different from the original probe region of the target gene to be normalized. This allowed internal standardization of each individual qPCR reaction by multiplex PCR. The calculated performance differences were used as a filter for the measurements within the target tissues, i.e. primer/probe differences of each individual gene as depicted in the control cells and tissues were subtracted from each individual gene measurement performed in the target tissue. Thereafter, the individual, filtered CT values were normalized to the different reference genes. Differences between the CT values of the quantitative PCR reactions of the ARCHEON genes and the reference genes remaining after filtering the primer/probe performance differences were determined and transformed into “copy numbers per cell”. This was done by subtracting the CT values of the target genes from the CT values of the reference genes. The resulting ΔCT values were then transformed in gene copy numbers, with the ΔCT value of the reference gene (ΔCT=0) being defined as “2 copies per cell”, by the following formula: 2*(2̂(ΔCT*(−1))). All the calculations were done using standard software (Microsoft Excel™).

### REFERENCES

### Patents Cited

[0577] U.S. Pat. No. 4,843,155 Chomezynski, P.
[0578] U.S. Pat. No. 5,262,31 Liang, P., and Pardee, A. B., 1993
[0579] U.S. Pat. No. 4,683,202 Mullis, K. B., 1987
[0580] U.S. Pat. No. 5,593,839
[0581] U.S. Pat. No. 5,578,832
[0582] U.S. Pat. No. 5,556,752
[0583] U.S. Pat. No. 5,631,734
[0584] U.S. Pat. No. 5,599,695
[0585] U.S. Pat. No. 4,683,195
[0586] U.S. Pat. No. 5,498,531
[0587] U.S. Pat. No. 5,714,331
[0588] U.S. Pat. No. 5,641,673 Haseloff et al.,
[0589] U.S. Pat. No. 5,223,409 Lander, E.,
[0590] U.S. Pat. No. 5,976,813 Beutel et al.
[0591] U.S. Pat. No. 5,283,317
[0592] U.S. Pat. No. 6,203,987
[0593] U.S. Pat. No. 6,379,895
[0594] WO 97/29212
[0595] WO 97/27317
[0596] WO 95/22058
[0597] WO 99/12826
[0598] WO 97/02357
[0599] WO 94/13804
[0600] WO 94/10300
[0601] WO 97/14028
[0602] WO 99/52708
[0603] EP 0 785 280
[0604] EP 0 799 897
[0605] EP O 728520
[0606] EP 0 721 016
[0607] EP 0 321 201
[0608] GB2188638B

### Publications Cited

[0609] (1) Gusterson et al., Journal of Clinical Oncology 10, 1049-1056, 1992
[0610] (2) Achuthan et al., Cancer Genet Cytogenet. 130:166-72, 2001
[0611] (3) Tomasetto et al., FEBS Lett. 373: 245-249, 1995
[0612] (4) Pragnell et al., FEBS Lett. 291: 253-258, 1991
[0613] (5) Nakamichi et al. 1986
[0614] (6) Feo et al., Proc. Nat. Acad. Sci. 86: 6691-6695, 1989
[0615] (7) Davies et al., Proc. Nat. Acad. Sci. 86: 6691-6695, 1989
[0616] (8) Lee et al., Molec. Endocr. 9: 243-254, 1995
[0617] (9) Drane et al., Oncogene 15: 3013-3024, 1997
[0618] (10) Zhu et al., J. Biol. Chem. 272: 25500-25506, 1997
[0619] (11) Yuan et al., Proc. Nat. Acad. Sci. 95: 7939-7944, 1998
[0620] (12) Zhu et al., Proc. Nat. Acad. Sci. 96: 10848-10853, 1999
[0621] (13) Lee et al., Science 268: 836-844, 1995
[0622] (14) McCormick et al., Molec. Cell. Biol. 16: 5792-5800, 1996
[0623] (15) Tamimi et al., Genomics 40: 355-357, 1997
[0624] (16) Valle et al., FEBS Lett. 415: 163-168, 1997
[0625] (17) Kaneda et al., J. Biol. Chem. 263: 7672-7677, 1988
[0626] (18) Hoehe et al., Hum. Molec. Genet. 1: 175-178, 1992
[0627] (19) Yang-Feng et al., Abstract Cytogenet. Cell Genet. 40: 784, 1985
[0628] (20) Coussens et al., Science 230: 1132-1139, 1985
[0629] (21) van de Vijver et al., New Eng. J. Med. 319: 1239-1245, 1988
[0630] (22) Slamon et al., Science 244: 707-712, 1989
[0631] (23) Fukushige et al., Res. Commun. 134: 477-483, 1986
[0632] (24) Kaneko et al., Jpn. 3; Cancer Res. 78: 16-19, 1987
[0633] (25) Di Fiore et al., Science 237: 178-182, 1987
[0634] (26) Popescu et al., Genomics 4: 362-366, 1989.
[0635] (27) Qiu et al., Nature 393: 83-85, 1998
[0636] (28) Yu et al., Molec. Cell 2: 581-591, 1998
[0637] (29) Doherty et al., Proc. Nat. Acad. Sci. 96: 10869-10874, 1999
[0638] (30) Slamon et al., New Eng. J. Med. 344: 783-792, 2001
[0639] (31) Margolis et al., J. Clin. Invest. 102: 821-827, 1998
[0640] (32) Tanaka et al., J. Clin. Invest. 102: 821-827, 1998
[0641] (33) Dong et al., J. Biol. Chem. 272: 29104-29112, 1997
[0642] (34) Stein et al., EMBO J. 13:1331-40, 1994 (35) Nagata et al., Nature 319: 415-418, 1986
[0643] (36) Le Beau et al., Leukemia 1: 795-799, 1987,
[0644] (37) Jansson et al., EMBO J. 2: 561-565, 1983
[0645] (38) Thompson et al., Science 237:1610-1614, 1987
[0646] (39) Nakai et al., Proc. Nat. Acad. Sci. 85: 2781-2785, 1988
[0647] (40) Miyajima et al., Cell 57: 31-39, 1989
[0648] (41) Debuire et al., Science 224: 1456-1459, 1984
[0649] (42) Petkovich et al., Nature 330: 444-450, 1987
[0650] (43) Mattei et al., Hum Genet. 80: 186-188, 1988.
[0651] (44) Williams et al., Molec. Cell. Biol. 18: 2758-2767, 1998
[0652] (45) Saha et al, Molec. Cell. Biol. 18: 2758-2767, 1998
[0653] (46) Yan et al., Proc. Nat. Acad. Sci. 95: 3603-3608, 1998
[0654] (47) Singh et al., Nucleic Acids Res. 16: 3919-3929, 1988
[0655] (48) Tsai-Pflugfelder et al., Proc. Nat. Acad. Sci. 85: 7177-7181, 1988
[0656] (49) Chung et al., Proc. Nat. Acad. Sci. 86: 9431-9435, 1989
[0657] (50) Lang et al., Gene 221: 255-266, 1998
[0658] (51) Keith et al., Genes Chromosomes Cancer 4: 169-175, 1992
[0659] (52) Kingsmore et al., Mammalian Genome 4: 288-289, 1993
[0660] (53) Watt et al., Biochem. J. 303: 681-695, 1994
[0661] (54) Kiefer et al., J. Biol. Chem. 267: 12692-12699, 1992
[0662] (55) Shimasaki et al., Molec. Endocr. 4: 1451-1458, 1990
[0663] (56) Zazzi et al., Genomics 49: 401-410, 1998
[0664] (57) Bajalica et al., Hum. Genet. 89: 234-236, 1992
[0665] (58) Tonin et al., Genomics 18: 414-417, 1993
[0666] (59) Birkenbach et al., J. Virol. 67: 2209-2220, 1993
[0667] (60) Wang et al., Proc. Nat. Acad. Sci. 95: 492-498, 1998
[0668] (61) Klochendler-Yeivin et al., Curr Opin Genet Dev 121:73-9, 2002
[0669] (62) Ring et al., Genomics 51:140-3, 1998
[0670] (63) Darmon et al., Molec. Biol. Rep. 12: 277-283, 1987
[0671] (64) Zhou et al., J. Biol. Chem. 263: 15584-15589, 1988
[0672] (65) Korge et al., Proc. Nat. Acad. Sci. 89: 910-914, 1992
[0673] (66) Lessin et al., J. Invest. Derim 91: 572-578, 1988
[0674] (67) Romano et al., Cytogenet. Cell Genet. 58: 2009-2010, 1991.
[0675] (68) Fuchs et al., Proc. Nat. Acad. Sci. 89: 6906-6910, 1992
[0676] (69) Rogaev et al., Nature Genet. 5: 158-162, 1993
[0677] (70) Liu et al., Curr. Eye Res. 12: 963-974, 1993
[0678] (71) Nishida et al., Invest Ophthal. Vis. Sci. 37: 1800-1809, 1996
[0679] (72) Nishida et al., Am. J. Hum Genet. 61: 1268-1275, 1997
[0680] (73) Meesmann and Wilke, 1939
[0681] (74) Corden et al., Exp. Eye Res. 70: 4149, 2000
[0682] (75) van de Vijver et al., Mol Cell Biol 7, 2091-23, 1987
[0683] (76) Offterdinger et al., Biochem Biophys Res Comm 251, 907-13, 1988
[0684] (77) Sambrook et al., MOLECULAR CLONING: A LABORATORY MANUAL, 2d ed., 1989
[0685] (78) Ausubel et al., CURRENT PROTOCOLS IN MOLECULAR BIOLOGY, John Wiley & Sons, New York, N.Y., 1989.
[0686] (79) Tedder, T. F. et al., Proc. Natl. Acad. Sci. U.S.A. 85:208-212, 1988
[0687] (80) Hedrick, S. M. et al., Nature 308:149-153, 1984
[0688] (81) Lee, S. W. et al., Proc. Natl. Acad. Sci. U.S.A. 88:4225, 1984
[0689] (82) Sarkar, PCR Methods Applic. 2, 318-322, 1993
[0690] (83) Triglia et al., Nucleic Acids Res. 16, 81-86, 1988
[0691] (84) Lagerstrom et al., PCR Methods Applic. 1, 111-119, 1991
[0692] (85) Copeland & Jenkins, Trends in Genetics 7: 113-118, 1991
[0693] (86) Cohen, et al., Nature 366: 698-701, 1993
[0694] (87) Bonner et al., J. Mol. Biol. 81, 123 1973
[0695] (88) Bolton and McCarthy, Proc. Natl. Acad. Sci. U.S.A. 48, 1390 1962
[0696] (89) Plump et al., Cell 71: 343-353, 1992
[0697] (90) Altschul et al., Bull. Math. Bio. 48:603, 1986,
[0698] (91) Henikoff & Henikoff, Proc. Natl. Acad. Sci. USA 89:10915, 1992
[0699] (92) Pearson & Lipman, Proc. Nat'l. Acad. Sci. USA 85:2444, 1988
[0700] (93) Pearson et al., Meth. Enzymol. 183:63, 1990
[0701] (94) Needleman & Wunsch, J. Mol. Biol. 48:444, 1970
[0702] (95) Sellers, SIAM J. Appl. Math. 26:787, 1974
[0703] (96) Takamatsu, EMBO J. 6, 307-311, 1987
[0704] (97) Coruzzi et al., EMBO J. 3, 1671-1680, 1984
[0705] (98) Broglie et al., Science 224, 838-843, 1984
[0706] (99) Winter et al., Results Probl. Cell Differ. 17, 85-105, 1991
[0707] (100) Engelhard et al., Proc. Nat. Acad. Sci. 91, 3224-3227, 1994
[0708] (101) Logan & Shenk, Proc. Natl. Acad. Sci. 81, 3655-3659, 1984
[0709] (102) Scharf et al., Results Probl. Cell Differ. 20, 125-162, 1994
[0710] (103) Freshney R. I., ed., ANIMAL CELL CULTURE, 1986
[0711] (104) Wigler et al., Cell 11, 223-232, 1977
[0712] (105) Lowy et al., Cell 22, 817-823, 1980
[0713] (106) Wigler et al., Proc. Natl. Acad. Sci. 77, 3567-3570, 1980
[0714] (107) Colbere-Garapin et al., J. Mol. Biol. 150, 114, 1981
[0715] (108) Hartman & Mulligan, Proc. Natl. Acad. Sci. 85, 8047-8051, 1988
[0716] (109) Rhodes et al., Methods Mol. Biol. 55, 121-131, 1995
[0717] (110) Hampton et al., SEROLOGICAL METHODS: A LABORATORY MANUAL, APS Press, St. Paul, Minn., 1990

[0718] (111) Maddox et al., J. Exp. Med. 158, 1211-1216, 1983
[0719] (112) Porath et al., Prot. Exp. Purif. 3, 263-281, 1992
[0720] (113) Kroll et al., DNA Cell Biol. 12, 441-453, 1993
[0721] (114) Caruthers et al., Nucl. Acids Res. Symp. Ser. 215-223, 1980
[0722] (115) Horn et al. Nucl. Acids Res. Symp. Ser. 225-232, 1980
[0723] (116) Merrifield, J. Am. Chem. Soc. 85, 2149-2154, 1963
[0724] (117) Roberge et al., Science 269, 202-204, 1995
[0725] (118) Creighton, PROTEINS: STRUCTURES AND MOLECULAR PRINCIPLES, WH and Co., New York, N.Y., 1983
[0726] (119) Cronin et al., Human Mutation 7:244, 1996
[0727] (120) Landegran et al., Science 241:1077-1080, 1988
[0728] (121) Nakazawa et al., PNAS 91:360-364, 1994
[0729] (122) Abravaya et al., Nuc Acid Res 23:675-682, 1995
[0730] (123) Guatelli, J. C. et al., Proc. Natl. Acad. Sci. USA 87:1874-1878, 1990
[0731] (124) Kwoh, D. Y. et al., Proc. Natl. Acad. Sci. USA 86:1173-1177, 1989
[0732] (125) Lizardi, P. M. et al., Bio/Technology 6:1197, 1988
[0733] (126) Brown, Meth. Mol. Biol. 20, 18, 1994
[0734] (127) Sonveaux, Meth. Mol. Biol. 26, 1-72, 1994
[0735] (128) Uhlmann et al., Chem. Rev. 90, 543-583, 1990
[0736] (129) Gee et al., in Huber & Carr, MOLECULAR AND IMMUNOLOGIC APPROACHES, Publishing Co., Mt. Kisco, N.Y., 1994
[0737] (130) Agrawal et al., Trends Biotechnol. 10, 152-158, 1992
[0738] (131) Uhlmann et al., Tetrahedron. Lett. 215, 3539-3542, 1987
[0739] (132) Cech, Science 236, 1532-1539, 1987
[0740] (133) Cech, Ann. Rev. Biochem. 59, 543-568, 1990
[0741] (134) Couture & Stinchcomb, Trends Genet. 12, 510-515, 1996
[0742] (135) Haseloff et al. Nature 334, 585-591, 1988
[0743] (136) Kohler et al., Nature 256, 495-497, 1985
[0744] (137) Kozbor et al., J. Immunol. Methods 81, 3142, 1985
[0745] (138) Cote et al., Proc. Natl. Acad. Sci. 80, 2026-2030, 1983
[0746] (139) Cole et al., Mol. Cell. Biol. 62, 109-120, 1984
[0747] (140) Morrison et al., Proc. Natl. Acad. Sci. 81, 6851-6855, 1984
[0748] (141) Neuberger et al., Nature 312, 604-608, 1984
[0749] (142) Takeda et al., Nature 314, 452-454, 1985
[0750] (143) Burton, Proc. Natl. Acad. Sci. 88, 11120-11123, 1991
[0751] (144) Thirion et al., Eur. J. Cancer Prev. 5, 507-11, 1996
[0752] (145) Coloma & Morrison, Nat. Biotechnol. 15, 159-63, 1997
[0753] (146) Mallender & Voss, J. Biol. Chem. 269, 199-206, 1994
[0754] (147) Verhaar et al., Int. J. Cancer 61, 497-501, 1995
[0755] (148) Nicholls et al., J. Immunol. Meth. 165, 81-91, 1993
[0756] (149) Orlandi et al., Proc. Natl. Acad. Sci. 86, 3833-3837, 1989
[0757] (150) Winter et al., Nature 349, 293-299, 1991
[0758] (151) Lam, Anticancer Drug Des. 12, 145, 1997
[0759] (152) DeWitt et al., Proc. Natl. Acad. Sci. U.S.A. 90, 6909, 1993
[0760] (153) Erb et al. Proc. Natl. Acad. Sci. U.S.A. 91, 11422, 1994
[0761] (154) Zuckermann et al., J. Med. Chem. 37, 2678, 1994
[0762] (155) Cho et al., Science 261, 1303, 1993
[0763] (156) Carell et al., Angew. Chem. Int. Ed. Engl. 33, 2059 & 2061, 1994
[0764] (157) Gallop et al., J. Med. Chem. 37, 1233, 1994
[0765] (158) Houghten, BioTechniques 13, 412-421, 1992
[0766] (159) Lam, Nature 354, 8284, 1991
[0767] (160) Fodor, Nature 364, 555-556, 1993
[0768] (161) Cull et al., Proc. Natl. Acad. Sci. U.S.A. 89, 1865-1869, 1992
[0769] (162) Scott & Smith, Science 249, 386-390, 1990
[0770] (163) Devlin, Science 249, 404-406, 1990
[0771] (164) Cwirla et al., Proc. Natl. Acad. Sci. 97, 6378-6382, 1990
[0772] (165) Felici, J. Mol. Biol. 222, 301-310, 1991
[0773] (166) Jayawickreme et al., Proc. Natl. Acad. Sci. U.S.A. 19, 1614-1618, 1994
[0774] (167) Chelsky, Strategies for Screening Combinatorial Libraries 1995
[0775] (168) Salmon et al., Molecular Diversity 2, 57-63, 1996
[0776] (169) McConnell et al., Science 257, 1906-1912, 1992
[0777] (170) Sjolander & Urbaniczky, Anal. Chem. 63, 2338-2345, 1991
[0778] (171) Szabo et al., Curr. Opin. Struct. Biol. 5, 699-705, 1995
[0779] (172) Zervos et al., Cell 72, 223-232, 1993
[0780] (173) Madura et al., J. Biol. Chem. 268, 12046-12054, 1993
[0781] (174) Bartel et al., BioTechniques 14, 920-924, 1993
[0782] (175) Iwabuchi et al., Oncogene 8, 1693-1696, 1993
[0783] (176) Findeis et al. Trends in Biotechnol. 11, 202-205, 1993
[0784] (177) Chiou et al., GENE THERAPEUTICS: METHODS AND APPLICATIONS OF DIRECT GENETRANSFER J. A. Wolff, ed., 1994
[0785] (178) Wu & Wu, J. Biol. Chem. 263, 621-24, 1988
[0786] (179) Wu et al., J. Biol. Chem. 269, 542-46, 1994
[0787] (180) Zenke et al., Proc. Natl. Acad. Sci. U.S.A. 87, 3655-59, 1990
[0788] (181) Wu et al., J. Biol. Chem. 266, 33842, 1991
[0789] (182) REMINGTON'S PHARMACEUTICAL SCIENCES Maack Publishing Co., Easton, Pa.
[0790] (183) Hille, Excitable Membranes, Sunderland, Mass., Sinauer Associates, Inc.

TABLE 1

| DNA | Protein | | | | |
|---|---|---|---|---|---|
| SEQ ID NO: | SEQ ID NO: | Genbank ID | Unigene_v162_ID | Locus Link ID | Gene Name |
| 1 | 27 | NM_006148.1 | Hs.334851 | 3927 | LASP1 |
| 2 | 28 | NM_000723.1 | Hs.635 | 782 | CACNB1 |
| 3 | 29 | NM_000981.1 | Hs.381061 | 6143 | RPL19 |
| 4 | 30 | Y13467 | Hs.15589 | 5469 | PPARGBP |
| 5 | 31 | NM_016507.1 | Hs.416108 | 51755 | CrkRS/CRK7 |
| 6 | 32 | AB021742.1 | Hs:322431 | 4761 | NEUROD2 |
| 7 | 33 | NM_006804.1 | Hs.77628 | 10948 | MLN64/STARD3 |
| 8 | 34 | NM_003673.1 | Hs.343603 | 8557 | TELETHONIN |
| 9 | 35 | NM_002686.1 | Hs.1892 | 5409 | PNMT |
| 10 | 36 | X03363.1 | Hs.446352 | 2064 | ERBB2 |
| 11 | 37 | AB008790.1 | Hs.86859 | 2886 | GRB7 |
| 12 | 38 | NM_002809.1 | Hs.9736 | 5709 | PSMD3 |
| 13 | 39 | NM_000759.1 | Hs.2233 | 1440 | GCSFG/CSF3 |
| 14 | 40 | AI023317 | Hs.23106 | 9862 | KIAA0130/ |
| | | NM_014815 | | | TRAP100 |
| 15 | 41 | X55005 | Hs.724 | 7067 | c-erbA-1/ |
| | | | | | THRA |
| 16 | 42 | X72631 | Hs.2769166 | 9572 | NR1D1 |
| 17 | 43 | NM_007359.1 | Hs.83422 | 22794 | MLN51 |
| 18 | 44 | U77949.1 | Hs.405958 | 990 | CDC6 |
| 19 | 45 | U41742.1 | Hs.361071 | 5914 | RARA |
| | | NM_000964 | | | |
| 20 | 46 | NM_001067.1 | Hs.156346 | 7153 | TOP2A |
| 21 | 47 | NM_001552.1 | Hs.1516 | 3487 | IGFBP4 |
| 22 | 48 | NM_001838.1 | Hs.1652 | 1236 | CCR7 EBI1 |
| 23 | 49 | NM_003079.1 | Hs.437546 | 6605 | SMARCE1 BAF57 |
| 24 | 50 | X14487 | Hs.99936 | 3858 | KRT10 |
| 25 | 51 | NM_000223.1 | Hs.66739 | 3859 | KRT12 |
| 26 | 52 | NM_002279.2 | Hs.32950 | 3884 | /KRTHA3B |
| 53 | 76 | NM_005937 | Hs.497128 | 4302 | MLLT6 |
| 54 | 77 | XM_008147/ | Hs.371617 | 7703 | ZNF144/RNF110 |
| | | NM_007144 | | | |
| 55 | 78 | NM_138687 | Hs.9605 | 8396 | PIP5K2B |
| 56 | 79 | NM_020405 | Hs.125036 | 57125 | TEM7/PLXDC1 |
| 57 | 80 | AF129512 | Hs.258579 | 22806 | ZNFN1A3 |
| 58 | 81 | XM_085731 | Hs.421622 | 147179 | WIRE |
| | | NM_133264 | | | |
| 59 | 82 | NM_002795 | Hs.82793 | 5691 | PSMB3 |
| 60 | 83 | NM_033419 | Hs.91668 | 93210 | MGC9753 |
| | | | | | Variant a/ |
| | | | | | CAB2 |
| 61 | 84 | NM_033419 | Hs.91668 | 93210 | MGC9753 |
| | | | | | Variant c |
| 62 | 85 | NM_033419 | Hs.91668 | 93210 | MGC9753 |
| | | | | | Variant d |
| 63 | 86 | NM_033419 | Hs.91668 | 93210 | MGC9753 |
| | | | | | Variant e |
| 64 | 87 | NM_033419 | Hs.91668 | 93210 | MGC9753 |
| | | | | | Variant g |
| 65 | 88 | NM_033419 | Hs.91668 | 93210 | MGC9753 |
| | | | | | Variant h |
| 66 | 89 | NM_033419 | Hs.91668 | 93210 | MGC9753 |
| | | | | | Variant i |
| 67 | 90 | AF395708 | Hs.133167 | 94103 | ORMDL3 |
| 68 | 91 | NM_032875 | Hs.194498 | 84961 | MGC15482 |
| 69 | 92 | NM_032192 | Hs.286192 | 84152 | PPP1R1B |
| 70 | 93 | NM_032339 | Hs.333526 | 84299 | MGC14832 |
| 71 | 94 | NM_057555 | Hs.133167 | 51242 | LOC51242/ |
| | | NM_139280 | | | ORMDL3 |
| 72 | 95 | NM_017748 | Hs.406223 | 54883 | FLJ20291 |
| 73 | 96 | NM_018530 | Hs.306777 | 55876 | Pro2521 |
| 74 | 97 | NM_016339 | Hs.158530 | 51195 | Link-GEFII |
| 75 | 98 | NM_032865 | Hs.99037 | 84951 | CTEN |
| 315 | 393 | XM_294897 | Hs.270564 | 30837 | NAP4 |
| 316 | 394 | NM_032351 | Hs.19347 | 84311 | MRLP45 |
| 317 | 395 | NM_000458 | Hs.408093 | 6928 | TCF2 |
| 318 | 396 | NM_152300 | Hs.380430 | 11056 | ROK1 |
| 319 | 397 | NM_019010 | Hs.84905 | 54474 | KRT20 |
| 320 | 398 | NM_173213 | Hs.9029 | 25984 | KRT23 |
| 321 | 399 | NM_033185 | Hs.307025 | 85293 | KRTAP3-3 |
| 322 | 400 | NM_031959 | Hs.307026 | 83897 | KRTAP3-2 |
| 323 | 401 | NG_000941 | | 85345 | KRTAP3P1 |
| 324 | 402 | NM_031958 | Hs.307027 | 83896 | KRTAP3-1 |
| 325 | 403 | NM_031957 | Hs.307030 | 83895 | KRTAP1-5 |
| 326 | 404 | NM_030966 | Hs.247935 | 81850 | KRTAP1-3 |
| 327 | 405 | NM_030967 | Hs.247934 | 81851 | KRTAP1-1 |
| 328 | 406 | AJ302536 | | 85296 | KRTAP2-2 |
| 329 | 407 | NM_033184 | | 85294 | KRTAP2-4 |
| 330 | 408 | NG_000939 | | 85343 | KRTAP2P1 |
| 331 | 409 | NM_033061 | Hs.380164 | 85287 | KRTAP4-7 |
| 332 | 410 | NM_033059 | Hs.307015 | 85282 | KRTAP4-14 |
| 333 | 411 | NM_031854 | Hs.307016 | 83755 | KRTAP4-12 |
| 334 | 412 | NM_033188 | Hs.307016 | 83755 | KRTAP4-5 |
| 335 | 413 | NM_033186 | | 85283 | KRTAP4-13 |
| 336 | 414 | NM_032524 | Hs.307022 | 84616 | KRTAP4-4 |
| 337 | 415 | NM_033062 | Hs.380165 | 85291 | KRTAP4-2 |
| 338 | 416 | NM_033060 | Hs.380165 | 85291 | KRTAP4-10 |
| 339 | 417 | NM_031961 | Hs.307013 | 83899 | KRTAP9-2 |
| 340 | 418 | NM_031962 | Hs.307012 | 83900 | KRTAP9-3 |
| 341 | 419 | NM_031963 | Hs.307011 | 83901 | KRTAP9-8 |
| 342 | 420 | NM_030975 | Hs.307010 | 81870 | KRTAP9-9 |
| 343 | 421 | NM_033191 | | 85280 | KRTAP9-4 |
| 344 | 422 | NG_000942 | | 85347 | KRTAP9P1 |
| 345 | 423 | XM_210345 | Hs.463016 | 85276 | KRTAP16-1 |
| 346 | 424 | NM_031964 | Hs.307009 | 83902 | KRTAP17-1 |
| 347 | 425 | NM_004138 | Hs.197874 | 3883 | KRTHA3A |
| 348 | 426 | NM_002279 | Hs.32950 | 3884 | KRTHA3B |
| 349 | 427 | NM_021013 | Hs.296942 | 3885 | KRTHA4 |
| 350 | 428 | NM_002277 | Hs.41696 | 3881 | KRTHA1 |
| 351 | 429 | Y16795 | | 8686 | KRTHAP1 |
| 352 | 430 | NM_003770 | Hs.159403 | 8688 | KRTHA7 |
| 353 | 431 | NM_006771 | Hs.248188 | 8687 | KRTHA8 |
| 354 | 432 | NM_002278 | Hs.41752 | 3882 | KRTHA2 |
| 355 | 433 | NM_002280 | Hs.73082 | 3886 | KRTHA5 |
| 356 | 434 | NM_003771 | Hs.248189 | 8689 | KRTHA6 |
| 357 | 435 | NM_002274 | Hs.433871 | 3860 | KRT13 |
| 358 | 436 | NM_002275 | Hs.80342 | 3866 | KRT15 |
| 359 | 437 | NM_002276 | Hs.309517 | 3880 | KRT19 |
| 360 | 438 | NM_000226 | Hs.2783 | 3857 | KRT9 |
| 361 | 439 | NM_000526 | Hs.355214 | 3861 | KRT14 |
| 362 | 440 | NM_005557 | Hs.432448 | 3868 | KRT16 |
| 363 | 441 | NM_000422 | Hs.2785 | 3872 | KRT17 |
| 364 | 442 | NM_005556 | Hs.23881 | 3855 | KRT7 |
| 365 | 443 | NG_000944 | | 85349 | KRTHBP4 |
| 366 | 444 | NG_000943 | | 85348 | KRTHBP3 |
| 367 | 445 | NM_002281 | Hs.170925 | 3887 | KRTHB1 |
| 368 | 446 | NM_002284 | Hs:278658 | 3892 | KRTHB6 |
| 369 | 447 | NM_002282 | Hs.182506 | 3889 | KRTHB3 |
| 370 | 448 | NG_000940 | | 85344 | KRTHBP2 |
| 371 | 449 | NM_002283 | Hs.182507 | 3891 | KRTHB5 |
| 372 | 450 | NM_033045 | Hs.272336 | 3890 | KRTHB4 |
| 373 | 451 | NM_033033 | Hs.134640 | 3888 | KRTHB2 |
| 374 | 452 | Y19213 | | 85340 | KRTHBP1 |
| 375 | 453 | NM_005555 | Hs.432677 | 3854 | KRT6B |
| 376 | 454 | NM_173086 | Hs.446417 | 286887 | KRT6E |
| 377 | 455 | NM_058242 | | 140446 | KRT6C |
| 378 | 456 | NM_005554 | Hs.367762 | 3853 | KRT6A |
| 379 | 457 | NM_000424 | Hs.433845 | 3852 | KRT5 |
| 380 | 458 | NM_033448 | Hs.55278 | 112802 | KRT6IRS |
| 381 | 459 | NM_175053 | Hs.56255 | 121391 | KRT6IRS4 |
| 382 | 460 | NM_080747/ | Hs.147040 | 140807 | K6IRS2/ |
| | | AY033495 | | | KRT6 |
| 383 | 461 | NM_175068 | Hs.319101 | 55410 | KRT6IRS3 |
| 384 | 462 | NM_000423 | Hs.707 | 3849 | KRT2A |
| 385 | 463 | NM_006121 | Hs.80828 | 3848 | KRT1 |
| 386 | 464 | NM_057088 | Hs.410397 | 3850 | KRT3 |
| 387 | 465 | NM_002272 | Hs.371139 | 3851 | KRT4 |
| 388 | 466 | NM_002273 | Hs.356123 | 3856 | KRT8 |
| 389 | 467 | NM_000224 | Hs.406013 | 3875 | KRT18 |
| 390 | 468 | NM_032950 | Hs.380710 | 79148 | MMP28 |
| 391 | 469 | NM_005419 | Hs.72988 | 6773 | STAT2 |
| 392 | 470 | NM_002046 | Hs.169476 | 2597 | GAPDH |

TABLE 2

| DNA | |
|---|---|
| SEQ ID NO: | Gene description |
| 1 | Member of a subfamily of LIM proteins that contains a LIM domain and an |
| | SH3 (Src homology region 3) domain |
| 2 | Beta 1 subunit of a voltage-dependent calcium channel (dihydropyridine |
| | receptor), involved in coupling of excitation and contraction in muscle, also |
| | acts as a calcium channel in various other tissues |
| 3 | Ribosomal protein L19, component of the large 60S ribosomal subunit |
| 4 | Protein with similarity to nuclear receptor-interacting proteins; binds and co- |
| | activates the nuclear receptors PPARalpha (PPARA), RARalpha (RARA), |
| | RXR, TRbeta1, and VDR |
| 5 | we26e02.x1 CDC2-related protein kinase 7 |
| 6 | Neurogenic differentiation, a basic-helix-loop-helix transcription factor that |
| | mediates neuronal differentiation |
| 7 | Protein that is overexpressed in malignant tissues, contains a putative trans- |
| | membrane region and a StAR Homology Domain (SHD), may function in |
| | steroidogenesis and contribute to tumor progression |
| 8 | Telethonin, a sarcomeric protein specifically expressed in skeletal and heart |
| | muscle, caps titin (TTN) and is important for structural integrity of the |
| | sarcomere |
| 9 | Phenylethanolamine N-methyltransferase, acts in catecholamine biosynthesis |
| | to convert norepinephrine to epinephrine |
| 10 | Tyrosine kinase receptor that has similarity to the EGF receptor, a critical |
| | component of IL-6 signaling through the MAP kinase pathway, overexpression |
| | associated with prostate, ovary and breast cancer |
| 11 | Growth factor receptor-bound protein, an SH2 domain-containing protein that |
| | has isoforms which may have a role in cell invasion and metastatic progression |
| | of esophageal carcinomas |
| 12 | Non-ATPase subunit of the 26S proteasome (prosome, macropain) |
| 13 | Granulocyte colony stimulating factor, a glycoprotein that regulates growth, |
| | differentiation, and survival of neutrophilic granulocytes |
| 14 | Member of the Vitamin D Receptor Interacting Protein co-activator complex, |
| | has strong similarity to thyroid hormone receptor-associated protein (murine |
| | Trap100) which function as a transcriptional coregulator |
| 15 | Thyroid hormone receptor alpha, a high affinity receptor for thyroid hormone |
| | that activates transcription; homologous to avian erythroblastic leukemia virus |
| | oncogene |
| 16 | encoding Rev-ErbAalp nuclear receptor subfamily 1, group D, member 1 |
| 17 | Protein that is overexpressed in breast carcinomas |
| 18 | Protein which interacts with the DNA replication proteins PCNA and Orc1, |
| | translocates from the nucleus following onset of S phase; S. cerevisiae |
| | homolog Cdc6p is required for initiation of S phase |
| 19 | Retinoic acid receptor alpha, binds retinoic acid and stimulates transcription in |
| | a ligand-dependent manner |
| 20 | DNA topoisomerase II alpha, member of a family of proteins that relieves |
| | torsional stress created by DNA replication, transcription, and cell division; |
| 21 | Insulin-like growth factor binding protein, the major IGFBP of osteoblast-like |
| | cells, binds IGF1 and IGF2 and inhibits their effects on promoting DNA and |
| | glycogen synthesis in osteoblastic cells |
| 22 | HUMEBI103 G protein-coupled receptor (EBI 1) gene exon 3 chemokine (C-C |
| | motif) receptor 7 G protein-coupled receptor |
| 23 | Protein with an HMG 1/2 DNA-binding domain that is subunit of the |
| | SNF/SWI complex associated with the nuclear matrix and implicated in |
| | regulation of transcription by affecting chromatin structure |
| 24 | Keratin 10, a type I keratin that is a component of intermediate filaments and is |
| | expressed in terminally differentiated epidermal cells; mutation of the |
| | corresponding gene causes epidermolytic hyperkeratosis |
| 25 | Keratin 12, a component of intermediate filaments in corneal epithelial cells; |
| | mutation of the corresponding gene causes Meesmann corneal dystrophy |
| 26 | Hair keratin 3B, a type I keratin that is a member of a family of structural |
| | proteins that form intermediate filaments |
| 53 | MLLT6 Myeloid/lymphoid or mixed-lineage leukemia (trithorax homolog, |
| | Drosophila); translocated to, 6 |
| 54 | zinc finger protein 144 (Mel-18) |
| 55 | Phosphatidylinositol-4-phosphate 5-kinase type II beta isoform a |
| 56 | tumor endothelial marker 7 precursor |
| 57 | zinc finger protein, subfamily 1A, 3 |
| 58 | WASP-binding protein putative cr16 and wip like protein similar to Wiskott- |
| | Aldrich syndrome protein |
| 59 | Proteasome (prosome, macropain) subunit, beta type, 3 |
| 60 | Predicted |
| 67 | ORM1-like 3 (S. cerevisiae) |
| 68 | F-box domain A Receptor for Ubiquitination Targets |
| 69 | protein phosphatase 1, regulatory (inhibitor) subunit 1B (dopamine and cAMP |
| | regulated phosphoprotein, DARPP-32) |
| 70 | Predicted Protein |
| 71 | Predicted Protein |
| 72 | Predicted Protein |
| 73 | Predicted Protein |
| 74 | Link-GEFII: Link guanine nucleotide exchange factor II |
| 75 | C-terminal tensin-like |
| 315 | Homo sapiens Nck, Ash and phospholipase C binding protein (NAP4) |
| 316 | Homo sapiens mitochondrial ribosomal protein L45 (MRPL45), nuclear gene |
| | encoding mitochondrial protein |
| 317 | Homo sapiens transcription factor 2, hepatic; LF-B3; variant hepatic nuclear |
| | factor (TCF2), transcript variant a |
| 318 | Homo sapiens DEAD (Asp-Glu-Ala-Asp) box polypeptide 52 (DDX52) |
| 319 | Homo sapiens keratin 20 (KRT20),, is a component of intermediate filament |
| | network |
| 320 | Homo sapiens keratin 23 (histone deacetylase inducible) (KRT23), is a |
| | component of intermediate filament network transcript variant 2 |
| 321 | Homo sapiens keratin associated protein 3-3 (KRTAP3-3)), is a component of |
| | intermediate filament network |
| 322 | Homo sapiens keratin associated protein 3-2 (KRTAP3-2), is a component of |
| | intermediate filament network |
| 323 | Homo sapiens keratin associated protein 3 pseudogene 1 (KRTAP3P1) on |
| | chromosome 17, is a component of intermediate filament network |
| 324 | Homo sapiens keratin associated protein 3-1 (KRTAP3-1), is a component of |
| | intermediate filament network |
| 325 | Homo sapiens keratin associated protein 1-5 (KRTAP1-5), is a component of |
| | intermediate filament network |
| 326 | Homo sapiens keratin associated protein 1-3 (KRTAP1-3), is a component of |
| | intermediate filament network |
| 327 | Homo sapiens keratin associated protein 1-1 (KRTAP1-1), is a component of |
| | intermediate filament network |
| 328 | HSA302536 Homo sapiens partial mRNA for keratin associated protein |
| | KAP2.2 (KRTAP2.2 gene), is a component of intermediate filament network |
| 329 | Homo sapiens keratin associated protein 2-4 (KRTAP2-4), is a component of |
| | intermediate filament network |
| 330 | Homo sapiens keratin associated protein 2 pseudogene 1 (KRTAP2P1) on |
| | chromosome 17, is a component of intermediate filament network |
| 331 | Homo sapiens keratin associated protein 4-7 (KRTAP4-7), is a component of |
| | intermediate filament network |
| 332 | Homo sapiens keratin associated protein 4-14 (KRTAP4-14), is a component |
| | of intermediate filament network |
| 333 | Homo sapiens keratin associated protein 4-12 (KRTAP4-12), is a component |
| | of intermediate filament network |
| 334 | Homo sapiens keratin associated protein 4-5 (KRTAP4-5), is a component of |
| | intermediate filament network |
| 335 | Homo sapiens keratin associated protein 4-13 (KRTAP4-13), is a component |
| | of intermediate filament network |
| 336 | Homo sapiens keratin associated protein 4-4 (KRTAP4-4), is a component of |
| | intermediate filament network |
| 337 | Homo sapiens keratin associated protein 4-2 (KRTAP4-2), is a component of |
| | intermediate filament network |
| 338 | Homo sapiens keratin associated protein 4-10 (KRTAP4-10), is a component |
| | of intermediate filament network |
| 339 | Homo sapiens keratin associated protein 9-2 (KRTAP9-2), is a component of |
| | intermediate filament network |
| 340 | Homo sapiens keratin associated protein 9-3 (KRTAP9-3), is a component of |
| | intermediate filament network |
| 341 | Homo sapiens keratin associated protein 9-8 (KRTAP9-8), is a component of |
| | intermediate filament network |
| 342 | Homo sapiens keratin associated protein 9-9 (KRTAP9-9), is a component of |
| | intermediate filament network |
| 343 | Homo sapiens keratin associated protein 9-4 (KRTAP9-4), is a component of |
| | intermediate filament network |
| 344 | Homo sapiens keratin associated protein 9 pseudogene 1 (KRTAP9P1) on |
| | chromosome 17, is a component of intermediate filament network |
| 345 | Homo sapiens keratin associated protein 16-1 (KRTAP16-1), is a component |
| | of intermediate filament network |
| 346 | Homo sapiens keratin associated protein 17-1 (KRTAP17-1), is a component |
| | of intermediate filament network |
| 347 | Homo sapiens keratin, hair, acidic, 3A (KRTHA3A), is a component of |
| | intermediate filament network |
| 348 | Homo sapiens keratin, hair, acidic, 3B (KRTHA3B), is a component of |
| | intermediate filament network |
| 349 | Homo sapiens keratin, hair, acidic, 4 (KRTHA4), is a component of |
| | intermediate filament network |
| 350 | Homo sapiens keratin, hair, acidic, 1 (KRTHA1), is a component of |
| | intermediate filament network |
| 351 | HSA16795 Homo sapiens KRTHAP1 pseudogene, is a component of |
| | intermediate filament network |
| 352 | Homo sapiens keratin, hair, acidic, 7 (KRTHA7), is a component of |
| | intermediate filament network |
| 353 | Homo sapiens keratin, hair, acidic, 8 (KRTHA8), is a component of |
| | intermediate filament network |
| 354 | Homo sapiens keratin, hair, acidic, 2 (KRTHA2), is a component of |
| | intermediate filament network |
| 355 | Homo sapiens keratin, hair, acidic, 5 (KRTHA5), is a component of |
| | intermediate filament network |
| 356 | Homo sapiens keratin, hair, acidic, 6 (KRTHA6), is a component of |
| | intermediate filament network |
| 357 | Homo sapiens keratin 13 (KRT13), transcript variant 2, is a component of |
| | intermediate filament network |
| 358 | Homo sapiens keratin 15 (KRT15), is a component of intermediate filament |
| | network |
| 359 | Homo sapiens keratin 19 (KRT19), is a component of intermediate filament |
| | network |
| 360 | Homo sapiens keratin 9 (epidermolytic palmoplantar keratoderma) (KRT9), is |
| | a component of intermediate filament network |
| 361 | Homo sapiens keratin 14 (epidermolysis bullosa simplex, Dowling-Meara, |
| | Koebner) (KRT14), is a component of intermediate filament network |
| 362 | Homo sapiens keratin 16 (focal non-epidermolytic palmoplantar keratoderma) |
| | (KRT16), is a component of intermediate filament network |
| 363 | Homo sapiens keratin 17 (KRT17), is a component of intermediate filament |
| | network |
| 364 | Homo sapiens keratin 7 (KRT7), is a component of intermediate filament |
| | network |
| 365 | Homo sapiens psihHbD hair keratin pseudogene (KRTHBP4) on chromosome |
| | 12, is a component of intermediate filament network |
| 366 | Homo sapiens psihHbC hair keratin pseudogene (KRTHBP3) on chromosome |
| | 12, is a component of intermediate filament network |
| 367 | Homo sapiens keratin, hair, basic, 1 (KRTHB1), is a component of |
| | intermediate filament network |
| 368 | Homo sapiens keratin, hair, basic, 6 (monilethrix) (KRTHB6), is a component |
| | of intermediate filament network |
| 369 | Homo sapiens keratin, hair, basic, 3 (KRTHB3), is a component of |
| | intermediate filament network |
| 370 | Homo sapiens psihHbB hair keratin pseudogene (KRTHBP2) on chromosome |
| | 12, is a component of intermediate filament network |
| 371 | Homo sapiens keratin, hair, basic, 5 (KRTHB5), is a component of |
| | intermediate filament network |
| 372 | Homo sapiens keratin, hair, basic, 4 (KRTHB4),, is a component of |
| | intermediate filament network |
| 373 | Homo sapiens keratin, hair, basic, 2 (KRTHB2), is a component of |
| | intermediate filament network |
| 374 | HSPSIHHBA Homo sapiens putative psihHbA pseudogene for hair keratin, |
| | exons 2 to 7 |
| 375 | Homo sapiens keratin 6B (KRT6B), is a component of intermediate filament |
| | network |
| 376 | Homo sapiens keratin 6E (KRT6E), is a component of intermediate filament |
| | network |
| 377 | Homo sapiens keratin 6C (KRT6C), is a component of intermediate filament |
| | network |
| 378 | Homo sapiens keratin 6A (KRT6A),, is a component of intermediate filament |
| | network |
| 379 | Homo sapiens keratin 5 (epidermolysis bullosa simplex, Dowling- |
| | Meara/Kobner/Weber-Cockayne types) (KRT5), is a component of |
| | intermediate filament network |
| 380 | Homo sapiens keratin 6 irs (KRT6IRS), is a component of intermediate |
| | filament network |
| 381 | Homo sapiens keratin 6 irs4 (K6IRS4), is a component of intermediate |
| | filament network |
| 382 | Homo sapiens keratin protein K6irs (K6IRS2), is a component of intermediate |
| | filament network |
| 383 | Homo sapiens keratin protein K6irs (K6IRS2), is a component of intermediate |
| | filament network |
| 384 | Homo sapiens keratin 2A (epidermal ichthyosis bullosa of Siemens) (KRT2A), |
| | is a component of intermediate filament network |
| 385 | Homo sapiens keratin 1 (epidermolytic hyperkeratosis) (KRT1), is a |
| | component of intermediate filament network |
| 386 | Homo sapiens keratin 3 (KRT3), is a component of intermediate filament |
| | network |
| 387 | Homo sapiens keratin 4 (KRT4), is a component of intermediate filament |
| | network |
| 388 | Homo sapiens keratin 8 (KRT8), is a component of intermediate filament |
| | network |
| 389 | Homo sapiens keratin 18 (KRT18), is a component of intermediate filament |
| | network |
| 390 | Homo sapiens matrix metalloproteinase 28 (MMP28), transcript variant 2 |
| 391 | Homo sapiens signal transducer and activator of transcription 2, 113 kDa |
| | (STAT2) |
| 392 | Homo sapiens glyceraldehyde-3-phosphate dehydrogenase (GAPD) |

TABLE 3

| DNA | | |
|---|---|---|
| SEQ ID | | |
| NO: | Gene function | Subcellular localization |
| 1 | SH3/SH2 adapter protein | — |
| 2 | voltage-gated calcium channel membrane fraction Channel [passive transporter] | Plasma membrane |
| 3 | RNA binding structural protein of ribosome protein biosynthesis | Cytoplasm |
| 4 | transcription co-activator nucleus Pol II transcription | Nucleus |
| 5 | — | — |
| 6 | transcription factor transcription regulation from Pol II promoter neurogenesis | — |
| 7 | mitochondrial transport steroid and lipid metabolism | Cytoplasm |
| 8 | structural protein of muscle sarcomere alignment | Cytoplasm |
| 9 | phenylethanolamine N-methyltransferase Transferase | — |
| 10 | Neu/ErbB-2 receptor receptor signaling protein tyrosine kinase | Plasma membrane |
| 11 | SH3/SH2 adapter protein EGF receptor signaling pathway | Cytoplasm |
| 12 | 26S proteasome Protein degradation Proteasome subunit | Cytoplasm |
| 13 | developmental processes positive control of cell proliferation | Extracellular space |
| 14 | fatty acid omega-hydroxylase fatty acid omega-hydroxylase | — |
| 15 | DNA-binding protein Transcription factor | Nucleus |
| 16 | steroid hormone receptor transcription co-repressor | Nucleus |
| 17 | — | — |
| 18 | nucleotide binding cell cycle regulator DNA replication checkpoint regulation of CDK activity | nucleus |
| 19 | retinoic acid receptor transcription co-activator transcription factor | nucleus |
| 20 | DNA binding DNA topoisomerase (ATP-hydrolyzing) | nucleus |
| 21 | skeletal development DNA metabolism signal transduction cell proliferation | |
| 22 | | plasma membrane |
| 23 | chromatin binding transcription co-activator nucleosome disassembly transcription | nucleus nuclear chromosome |
| 24 | Cell structure Cytoskeletal Epidermal Development and Maintenance | cytoplasm |
| 25 | structural protein vision cell shape and cell size control intermediate filament | cytoplasm |
| 26 | cell shape and cell size control Cell structure | cytoplasm |
| 53 | | — |
| 54 | leucine-zipper containing fusion | — |
| 55 | | |
| 56 | Tumor endothelial marker 7 precursor; may be involved in angiogenesis | — |
| 57 | Aiolos; DNA binding protein that may be a transcription factor; has strong similarity to murine | — |
| | Znfn1a3, contains zinc finger domain | |
| 58 | The WASP-binding protein WIRE has a role in the regulation of the actin filament system | — |
| | downstream of the platelet-derived growth factor receptor | |
| 59 | | — |
| 60 | | — |
| 61 | | — |
| 67 | | — |
| 68 | | — |
| 69 | Midbrain dopaminergic neurons play a critical role in multiple brain functions, and abnormal | — |
| | signaling through dopaminergic pathways has been implicated in several major neurologic | |
| | and psychiatric disorders. One well-studied target for the actions of dopamine is DARPP32. | |
| 70 | | — |
| 71 | | — |
| 72 | | — |
| 73 | | — |
| 74 | Brain-specific guanine nucleotide exchange factor; activates the ERK/MAP kinase cascade plus | — |
| | R-Ras and H-ras; activates targets through a Ca2+- and diacylglycerol-sensitive mechanism; | |
| | active protein associates with membranes | |
| 75 | C-terminal tensin-like Phosphotyrosine-binding domain, phosphotyrosine-interaction (PI) domain | — |
| 315 | | |
| 316 | | |
| 317 | | |
| 318 | | cytoplasm |
| 319 | KRT20, integral part of the intermediate filamentous network | Cytoplasm |
| 320 | KRT23, integral part of the intermediate filamentous network | Cytoplasm |
| 321 | KRTAP3-3, integral part of the intermediate filamentous network | Cytoplasm |
| 322 | KRTAP3-2, integral part of the intermediate filamentous network | Cytoplasm |
| 323 | KRTAP3P1, integral part of the intermediate filamentous network | Cytoplasm |
| 324 | KRTAP3-1, integral part of the intermediate filamentous network | Cytoplasm |
| 325 | KRTAP1-5, integral part of the intermediate filamentous network | cytoplasm |
| 326 | KRTAP1-3, integral part of the intermediate filamentous network | cytoplasm |
| 327 | KRTAP1-1, integral part of the intermediate filamentous network | Cytoplasm |
| 328 | KRTAP2-2, integral part of the intermediate filamentous network | Cytoplasm |
| 329 | KRTAP2-4, integral part of the intermediate filamentous network | Cytoplasm |
| 330 | KRTAP2P1, integral part of the intermediate filamentous network | Cytoplasm |
| 331 | KRTAP4-7, integral part of the intermediate filamentous network | Cytoplasm |
| 332 | KRTAP4-14, integral part of the intermediate filamentous network | Cytoplasm |
| 333 | KRTAP4-12, integral part of the intermediate filamentous network | cytoplasm |
| 334 | KRTAP4-5, integral part of the intermediate filamentous network | cytoplasm |
| 335 | KRTAP4-13, integral part of the intermediate filamentous network | Cytoplasm |
| 336 | KRTAP4-4, integral part of the intermediate filamentous network | Cytoplasm |
| 337 | KRTAP4-2, integral part of the intermediate filamentous network | Cytoplasm |
| 338 | KRTAP4-10, integral part of the intermediate filamentous network | Cytoplasm |
| 339 | KRTAP9-2, integral part of the intermediate filamentous network | Cytoplasm |
| 340 | KRTAP9-3, integral part of the intermediate filamentous network | Cytoplasm |
| 341 | KRTAP9-8, integral part of the intermediate filamentous network | cytoplasm |
| 342 | KRTAP9-9, integral part of the intermediate filamentous network | cytoplasm |
| 343 | KRTAP9-4, integral part of the intermediate filamentous network | Cytoplasm |
| 344 | KRTAP9P1, integral part of the intermediate filamentous network | Cytoplasm |
| 345 | KRTAP16-1, integral part of the intermediate filamentous network | Cytoplasm |
| 346 | KRTAP17-1, integral part of the intermediate filamentous network | Cytoplasm |
| 347 | KRTHA3A, integral part of the intermediate filamentous network | Cytoplasm |
| 348 | KRTHA3B, integral part of the intermediate filamentous network | Cytoplasm |
| 349 | KRTHA4, integral part of the intermediate filamentous network | cytoplasm |
| 350 | KRTHA1, integral part of the intermediate filamentous network | cytoplasm |
| 351 | KRTHAP1, integral part of the intermediate filamentous network | Cytoplasm |
| 352 | KRTHA7, integral part of the intermediate filamentous network | Cytoplasm |
| 353 | KRTHA8, integral part of the intermediate filamentous network | Cytoplasm |
| 354 | KRTHA2, integral part of the intermediate filamentous network | Cytoplasm |
| 355 | KRTHA5, integral part of the intermediate filamentous network | Cytoplasm |
| 356 | KRTHA6, integral part of the intermediate filamentous network | Cytoplasm |
| 357 | KRT13, integral part of the intermediate filamentous network | cytoplasm |
| 358 | KRT15, integral part of the intermediate filamentous network | cytoplasm |
| 359 | KRT19, integral part of the intermediate filamentous network | Cytoplasm |
| 360 | KRT9, integral part of the intermediate filamentous network | Cytoplasm |
| 361 | KRT14, integral part of the intermediate filamentous network | Cytoplasm |
| 362 | KRT16, integral part of the intermediate filamentous network | Cytoplasm |
| 363 | KRT17, integral part of the intermediate filamentous network | Cytoplasm |
| 364 | KRT7, integral part of the intermediate filamentous network | Cytoplasm |
| 365 | KRTHBP4, integral part of the intermediate filamentous network | cytoplasm |
| 366 | KRTHBP3, integral part of the intermediate filamentous network | cytoplasm |
| 367 | KRTHB1, integral part of the intermediate filamentous network | Cytoplasm |
| 368 | KRTHB6, integral part of the intermediate filamentous network | Cytoplasm |
| 369 | KRTHB3, integral part of the intermediate filamentous network | Cytoplasm |
| 370 | KRTHBP2, integral part of the intermediate filamentous network | Cytoplasm |
| 371 | KRTHB5, integral part of the intermediate filamentous network | Cytoplasm |
| 372 | KRTHB4, integral part of the intermediate filamentous network | Cytoplasm |
| 373 | KRTHB2, integral part of the intermediate filamentous network | cytoplasm |
| 374 | KRTHBP1, integral part of the intermediate filamentous network | cytoplasm |
| 375 | KRT6B, integral part of the intermediate filamentous network | Cytoplasm |
| 376 | KRT6E, integral part of the intermediate filamentous network | Cytoplasm |
| 377 | KRT6C, integral part of the intermediate filamentous network | Cytoplasm |
| 378 | KRT6A, integral part of the intermediate filamentous network | Cytoplasm |
| 379 | KRT5, integral part of the intermediate filamentous network | Cytoplasm |
| 380 | KRT6IRS, integral part of the intermediate filamentous network | Cytoplasm |
| 381 | KRT6IRS4, integral part of the intermediate filamentous network | cytoplasm |
| 382 | KRT6, integral part of the intermediate filamentous network | Cytoplasm |
| 383 | KRT6IRS3, integral part of the intermediate filamentous network | Cytoplasm |
| 384 | KRT2A, integral part of the intermediate filamentous network | Cytoplasm |
| 385 | KRT1, integral part of the intermediate filamentous network | Cytoplasm |
| 386 | KRT3, integral part of the intermediate filamentous network | Cytoplasm |
| 387 | KRT4, integral part of the intermediate filamentous network | Cytoplasm |
| 388 | KRT8, integral part of the intermediate filamentous network | cytoplasm |
| 389 | KRT18, integral part of the intermediate filamentous network | Cytoplasm |

TABLE 4

| | | | | | | |
|---|---|---|---|---|---|---|
| | Pro- | | | | | |
| DNA | tein | | | | | |
| SEQ | SEQ | | | | | |
| ID | ID | Gene | | | | |
| NO: | NO: | Name | DBSNP ID | Type | Codon | AA-Seq |

| | | | | | | |
|---|---|---|---|---|---|---|
| 9 | 34 | ERBB2 | rs2230698 | coding- | TCA\|TCG | S\|S |
| | | | | synon | | |
| 9 | 34 | ERBB2 | rs2230700 | noncod- | | |
| | | | | ing | | |
| 9 | 34 | ERBB2 | rs1058808 | coding- | CCC\|GCC | P\|A |
| | | | | nonsynon | | |
| 9 | 34 | ERBB2 | rs1801200 | noncod- | | |
| | | | | ing | | |
| 9 | 34 | ERBB2 | rs903506 | noncod- | | |
| | | | | ing | | |
| 9 | 34 | ERBB2 | rs2313170 | noncod- | | |
| | | | | ing | | |
| 9 | 34 | ERBB2 | rs1136201 | coding- | ATC\|GTC | I\|V |
| | | | | nonsynon | | |
| 9 | 34 | ERBB2 | rs2934968 | noncod- | | |
| | | | | ing | | |
| 9 | 34 | ERBB2 | rs2172826 | noncod- | | |
| | | | | ing | | |
| 9 | 34 | ERBB2 | rs1810132 | coding- | ATC\|GTC | I\|V |
| | | | | nonsynon | | |
| 9 | 34 | ERBB2 | rs1801201 | noncod- | | |
| | | | | ing | | |
| 14 | 39 | c- | rs2230702 | coding- | TCC\|TCT | S\|S |
| | | erbA-1 | | synon | | |
| 14 | 39 | c- | rs2230701 | coding- | GCC\|GCT | A\|A |
| | | erbA-1 | | synon | | |
| 14 | 39 | c- | rs1126503 | coding- | ACC\|AGC | T\|S |
| | | erbA-1 | | nonsynon | | |
| 14 | 39 | c- | rs3471 | noncod- | | |
| | | erbA-1 | | ing | | |
| 19 | 44 | TOP2A | rs13695 | noncod- | | |
| | | | | ing | | |
| 19 | 44 | TOP2A | rs471692 | noncod- | | |
| | | | | ing | | |
| 19 | 44 | TOP2A | rs558068 | noncod- | | |
| | | | | ing | | |
| 19 | 44 | TOP2A | rs1064288 | noncod- | | |
| | | | | ing | | |
| 19 | 44 | TOP2A | rs1061692 | coding- | GGA\|GGG | G\|G |
| | | | | synon | | |
| 19 | 44 | TOP2A | rs520630 | noncod- | | |
| | | | | ing | | |
| 19 | 44 | TOP2A | rs782774 | coding- | AAT\|ATT\|A | N\|I\|I\|F |
| | | | | nonsynon | TT\|TTT | |
| 19 | 44 | TOP2A | rs565121 | noncod- | | |
| | | | | ing | | |
| 19 | 44 | TOP2A | rs2586112 | noncod- | | |
| | | | | ing | | |
| 19 | 44 | TOP2A | rs532299 | coding- | TTT\|GTT | F\|V |
| | | | | nonsynon | | |
| 19 | 44 | TOP2A | rs2732786 | noncod- | | |
| | | | | ing | | |
| 19 | 44 | TOP2A | rs1804539 | noncod- | | |
| | | | | ing | | |
| 19 | 44 | TOP2A | rs1804538 | noncod- | | |
| | | | | ing | | |
| 19 | 44 | TOP2A | rs1804537 | noncod- | | |
| | | | | ing | | |
| 19 | 44 | TOP2A | rs1141364 | coding- | AAA\|AAG | K\|K |
| | | | | synon | | |
| 23 | 48 | KRT10 | rs12231 | noncod- | | |
| | | | | ing | | |
| 23 | 48 | KRT10 | rs1132259 | coding- | CAT\|CGT | H\|R |
| | | | | nonsynon | | |
| 23 | 48 | KRT10 | rs1132257 | coding- | CTG\|TTG | L\|L |
| | | | | synon | | |
| 23 | 48 | KRT10 | rs1132256 | coding- | GCC\|GCT | A\|A |
| | | | | synon | | |
| 23 | 48 | KRT10 | rs1132255 | coding- | CTG\|TTG | L\|L |
| | | | | synon | | |
| 23 | 48 | KRT10 | rs1132254 | coding- | GGC\|GGT | G\|G |
| | | | | synon | | |
| 23 | 48 | KRT10 | rs1132252 | coding- | TTC\|TTT | F\|F |
| | | | | synon | | |
| 23 | 48 | KRT10 | rs1132268 | coding- | CAG\|GAG | Q\|E |
| | | | | nonsynon | | |
| 23 | 48 | KRT10 | rs1132258 | coding- | CGG\|TGG | R\|W |
| | | | | nonsynon | | |

TABLE 5

| | |
|---|---|
| PRIMER | SEQUENCE |

| | |
|---|---|
| CACNB1 | FAM 5′ CCATATATAAAACCACTGTCCTGTCCTTTGTGGCT |
| | 3′TAMRA |
| CACNB1 | 5′ CCCCCATCTGTCTGTCTATATTTGTC 3′ |
| FOR | |
| CACNB1 | 5′ TGCCTACGCTGACGACTATGTG 3′ |
| REV | |
| CDC6 | FAM 5′ TTTGGTTTTCTACAACTGTTGCTAT 3′TAMRA |
| CDC6 FOR | 5′ GGGCTCCACACACCAGATG 3′ |
| CDC6 REV | 5′ ACGCTCTGAGCACCCTCTACA 3′ |
| EBI1-1 | FAM 5′ TGTCACAGGGACTGAAAACCTCTCCTCATGT |
| | 3′TAMRA |
| EBI1-1 | 5′ CCCAAGGCCACGAGCTT 3′ |
| FOR | |
| EBI1-1 | 5′ TGTTGCTCTCTTAACGAATCGAAA 3′ |
| REV | |
| EBI1-2 | FAM 5′ CTGGTCAAACAAACTCTCTGAACCCCTCC 3′TAMRA |
| EBI1-2 | 5′ TGGTGAGGAAAAGCGGACAT 3′ |
| FOR | |
| EBI1-2 | 5′ CTGGCTTGGAGGACAGTGAAG 3′ |
| REV | |
| GCSF | FAM 5′ CCAAGCCCTCCCCATCCCATGTAT 3′TAMRA |
| GCSF FOR | 5′ GAGGTGTCGTACCGCGTTCTA 3′ |
| GCSF REV | 5′ CCGTTCTGCTCTTCCCTGTCT 3′ |
| GRB7 | FAM 5′ CCAGACCCGCTTCACTGACCTGC 3′TAMRA |
| GRB7 FOR | 5′ CGCCTGTACTTCAGCATGGA 3′ |
| GRB7 REV | 5′ GCGGTTCAGCTGGTGGAA 3′ |
| HKA3 | FAM 5′ ACCCCGAGGCATCACCACAAATCAT 3′TAMRA |
| HKA3 FOR | 5′ AGTTCTGCCTCTCTGACAACCAT 3′ |
| HKA3 REV | 5′ TAGGCTCAGAGTCAGACCCAAAC 3′ |
| MLN50 | FAM 5′ CCCTCGTGGGCTTGTGCTCGG 3′TAMRA |
| MLN50 | 5′ AAGCCGCCAGTTCATCTTTTT 3′ |
| FOR | |
| MLN50 | 5′ CTTGTGGTTCAAGTCAAATGTTCAG 3′ |
| REV | |
| MLN64-1 | FAM 5′ TCTGCCTGCGCTCTCGTCGGT 3′TAMRA |
| MLN64-1 | 5′ GGGCTGGGCACCTGACTT 3′ |
| FOR | |
| MLN64-1 | 5′ CCCAACAAGGGTCCCAGACT 3′ |
| REV | |
| MLN64-2 | FAM 5′ CGGCGCATTGAGCGGCG 3′TAMRA |
| MLN64-2 | 5′ CCCAAGGGACTTCGTGAATG 3′ |
| FOR | |
| MLN64-2 | 5′ GGCGATCCCTGATGACAAGTA 3′ |
| REV | |
| PPARBP | FAM 5′ AGCACCAAGTGTGAACCAGGTACAATGGC |
| | 3′TAMRA |
| PPARBP | 5′ GAGGGAGGCTCTGCTTTGG 3′ |
| FOR | |
| PPARBP | 5′ TCACAACTAGGGGGTGAGGAG 3′ |
| REV | |
| PSMD3 | FAM 5′ TGCAGAGGAACGGCGTGAGCG 3′TAMRA |
| PSMD3 | 5′ TGAGGTTTCCTCCCAAATCGTA 3′ |
| FOR | |
| PSMD3 | 5′ CAGCTCAAGGGAAGCTGTCATC 3′ |
| REV | |
| RAR | FAM 5′ CCCCCACATGTTCCCCAAGATGCT 3′TAMRA |
| RAR FOR | 5′ GGAGGCGCTAAAGGTCTACGT 3′ |
| RAR REV | 5′ TGATGCTTCGCAGGTCAGTAA 3′ |
| RPL23A | FAM 5′ CTCCTGCCCCTGCTAAAGGTGAAGCC 3′TAMRA |
| RPL23A | 5′ GGACGCGTGGGCTTTTC 3′ |
| FOR | |
| RPL23A | 5′ TGTGGCTGTGGACACCTTTC 3′ |
| REV | |
| RPL19 | FAM 5′ CCACAAGCTGAAGGCAGACAAGGCC 3′TAMRA |
| RPL19 | 5′ GCGGATTCTCATGGAACACA 3′ |
| FOR | |
| RPL19 | 5′ GGTCAGCCAGGAGCTTCTTG 3′ |
| REV | |
| NEUROD2 | FAM 5′ ACCACCTTGCGCAGGTTGTCCAG 3′TAMRA |
| NBUROD2 | 5′ CGCATGCACGACCTGAAC 3′ |
| FOR | |
| NEUROD2 | 5′ GTCTCGATCTTGGACAGCTTCTG 3′ |
| REV | |
| TELE | FAM 5′ ACAGTGTCCACACGGCCCGAGG 3′TAMRA |
| TELE- | |
| THONIN | |
| TELE | 5′ CTGGGCAGAATGGAAGGATCT 3′ |
| TELE- | |
| THONIN | |
| FOR | |
| TELE | 5′ GGGACTCTAGCAGACCCACACT 3′ |
| TELE- | |
| THONIN | |
| REV | |
| PENT | FAM 5′ CACCCACCTGGATTCCCTGTTC 3′TAMRA |
| PNMT | |
| PENT | 5′ CCTTCAGACAGGCGTAGATGATG 3′ |
| PNMT FOR | |
| PENT | 5′ GGGTATTATTTCTTTATTAGGTGCCACTT 3′ |
| PNMT REV | |
| HER2/ | FAM 5′ TTCCCTAAGGCTTTCAGTACCCAGGATCTG |
| NEU; | 3′TAMRA |
| ERBB2 | |
| HER2/ | 5′ CCAGCTTGGCCCTTTCCT 3′ |
| NEU; | |
| ERBB FOR | |
| HER2/ | 5′ GAATGGGTCGCTTTTCGTTCCTTAG 3′ |
| NEU; | |
| ERBB REV | |
| KIA0130 | FAM 5′ TCACGGACCTCAGCGTGCCCCT 3′TAMRA |
| KIA0130 | 5′ TGGTGAAGGTGTCAGCCATGT 3′ |
| FOR | |
| KIA0130 | 5′ TCAGAGTGCAGCAATGGCTTT 3′ |
| REV | |
| THRA | FAM 5′ ACCTCCTTCCCCAGCTCGCG 3′TAMRA |
| THRA FOR | 5′ GGCAACATCTTACTTGTCCTTTGA 3′ |
| THRA REV | 5′ CCAAGGAAGGACAGACAACTATTTC 3′ |
| MLN51 | FAM 5′ TCCTCCCTATCCATGGCACTAAACCACTTC |
| | 3′TAMRA |
| MLN51 | 5′ TGGGCAAGGGCTCCTATCT 3′ |
| FOR | |
| MLN51 | 5′ GTTACCCCTGGCAGACGTATG 3′ |
| REV | |
| TOP2A | FAM 5′ TGCCTCTGAGTCTGAATCTCCCAAAGAGAGA |
| | 3′TAMRA |
| TOP2A | 5′ GAGTAGTTATGTGATTATTTCAGCTCTTGAC 3′ |
| FOR | |
| TOP2A | 5′ TCAAATGTTGTCCCCGAGTCT 3′ |
| REV | |
| KRT10 | FAM 5′ CAGAAATTCGGAAGACAGAACTATTGTCATGCC |
| | 3′TAMRA T |
| KRT10 | 5′ GATTAGTAACCCATAGCAGTTGAAGGT 3′ |
| FOR | |
| KRT10 | 5′ ATTTACTGAGGGTGGTGTGAACATAC 3′ |
| REV | |
| K12 | FAM 5′ TGACAGACTCCAAATCACAAGCACAGTCAAC |
| KRT12 | 3′TAMRA |
| K12 | 5′ TGATGGTTTGGAGGAAAGTTTATTT 3′ |
| KRT12 | |
| FOR | |
| K12 | 5′ TTTGGTTGGGTCTTTAGAGGAATC 3′ |
| KRT12 | |
| REV | |
| NR1D1 | FAM 5′ TGCCAACCATGCATCAGGTAGCCC 3′TAMRA |
| NR1D1 | 5′ CAGCTCACCTGGCAACTTCA 3′ |
| FOR | |
| NR1D1 | 5′ CCTGATTTTCCCAGCGATGT 3′ |
| REV | |
| HSERBT1 | FAM 5′ CGCCGCTCCCGGTTCTGCT 3′TAMRA |
| HSERBT | 5′ TGGCCAAGCGTAAGCTGATT 3′ |
| FOR | |
| HSERBT | 5′ GCTGCAGTGATCGGATCATCT 3′ |
| REV | |
| MLLT6 | FAM 5′ CACCATGGAGCCCATCGTGCTG 3′TAMRA |
| MLLT6 | 5′ ATCCCCGAGGTGCAATTTG 3′ |
| FOR | |
| MLLT6 | 5′ AGCGATCATGAGGCACGTACT 3′ |
| REV | |
| ZNF 144 | FAM 5′ CCTGCCAGAGATAGGAGACCCAGACAGCT |
| | 3′TAMRA |
| ZNF144 | 5′ ATCCCCCTGAGCCTTTTCA 3′ |
| FOR | |
| ZNF144 | 5′ CAGCCTCTGGTCCCACCAT 3′ |
| REV | |
| PIP5K2B | FAM 5′ TGATCATCAATTCCAAACCTCTCCCGAA |
| | 3′TAMRA |
| PIP5K2B | 5′ CCCCATGGTGTTCCGAAAC 3′ |
| FOR | |
| PIP5K2B | 5′ TGCCAGGAGCCTCCATACC 3′ |
| REV | |
| TEM7 | FAM 5′ CAGCCTTCTAAAACACAATGTATTCATGT |
| | 3′TAMRA |
| TEM7 FOR | 5′ CCTGAACTTAATGGTAGAATTCAAAGATC 3′ |
| TEM7 REV | 5′ TATTAACACTGAGAATCCATGCAGAGA 3′ |
| ZNFN1A3 | FAM 5′ TATCTGGTCTCAGGGATTGCTCCTATGTATTCAG |
| | 3′TAMRA C |
| ZNFN1A3 | 5′ CACAGAGCCCTGCTGAAGTG 3′ |
| FOR | |
| ZNFN1A3 | 5′ GCGAGGTCATTGGTTTTTAGAAA 3′ |
| REV | |
| WIRE | FAM 5′ CTGTGATCCGAAATGGTGCCAG 3′TAMRA |
| WIRE FOR | 5′ CCGTCTCCACATCCAAACCT 3′ |
| WIRE REV | 5′ ACCCATGCATTCGGTATGGT 3′ |
| PSMB3 | FAM 5′ AGTGGCACCTGCGCCGAACAA 3′TAMRA |
| PSMB3 | 5′ CCCCATGGTGACTGATGACTT 3′ |
| FOR | |
| PSMB3 | 5′ CCAGAGGGACTCACACATTCC 3′ |
| REV | |
| MGC9753 | FAM 5′ CCAGAAACTTTCCATCCCAAAGGCAGTCT |
| | 3′TAMRA |
| MGC9753 | 5′ CTGCCCCACAGGAATAGAATG 3′ |
| FOR | |
| MGC9753 | 5′ AAAAATCCAGTCTGCTTCAACCA 3′ |
| REV | |
| ORMDL3 | FAM 5′ AGCTGCCCCAGCTCCACGGA 3′TAMRA |
| ORMDL3 | 5′ TCCGTGATGAGCGTGCTTATC 3′ |
| FOR | |
| ORMDL3 | 5′ TCTCAGTACTTATTGATTCCAAAAATCC 3′ |
| REV | |
| MGC15482 | FAM 5′ TCCAGTGGAAGCAACCCCAGTGTTC 3′TAMRA |
| MGC15482 | 5′ CACTTCTAGAGCTACCGTGGAGTCT 3′ |
| FOR | |
| MGC15482 | 5′ CCCTCACTTTGTAACCCTTGCT 3′ |
| REV | |
| PPP1R1B | FAM 5′ CAGCGTGGCGCAACAACCCA 3′TAMRA |
| PPP1R1B | 5′ GGGATTGTTTCGCCACACATA 3′ |
| FOR | |
| PPP1R1B | 5′ CCGATGTTAAGGCCCATAGC 3′ |
| REV | |
| MGC14832 | FAM 5′ TAAAATGTCCGGCCAACATGAGTTCCC 3′TAMRA |
| MGC14832 | 5′ CGCAGTGCCTGGCAGAT 3′ |
| FOR | |
| MGC14832 | 5′ GACACCCCCTGACCTATGGA 3′ |
| REV | |
| LOC51242 | FAM 5′ CAGTGACGTCTCCCGTTCCCTTGGA 3′TAMRA |
| LOC51242 | 5′ TGGGTCCCTGTGTCCTCTTC 3′ |
| FOR | |
| LOC51242 | 5′ AGGGTCAGGAGGGAGAAAAC 3′ |
| REV | |
| FLJ20291 | FAM 5′ CCAGTGCCCACCCGTTAAAGAGTCAA 3′TAMRA |
| FLJ20291 | 5′ TTGTGGGACAGTCAGTAAGTTTGG 3′ |
| FOR | |
| FLJ20291 | 5′ ACAAGCACTCCCACCGAGAT 3′ |
| REV | |
| PRO2521 | FAM 5′ AGTCTGTCCTCACTGCCATCGCCA 3′TAMRA |
| PRO2521 | 5′ AAGCCTCTGGGTTTTCCCTTT 3′ |
| FOR | |
| PRO2521 | 5′ CCCACTGGTGACAGGATGGT 3′ |
| REV | |
| Link- | FAM 5′ CATCTGACATCTTTCGCGTGGAG 3′TAMRA |
| GEFII | |
| Link- | 5′ CTTTGCACGATGTCTCAACCA 3′ |
| GEFII | |
| FOR | |
| Link- | 5′ TTTCCCGTGGAGCAGGAA 3′ |
| GEFII | |
| REV | |
| CTEN | FAM 5′ CCGCCGCCTAATATGCAACATTAGGG 3′TAMRA |
| CTEN FOR | 5′ CGAGTATTCCAAAGCTGGTATCG 3′ |
| CTEN REV | 5′ ATCACAGAGAGATGGCCCTTATCT 3′ |
| NAP4 | FAM 5′ TCCGCCTCAGTCGCCTTTCG 3′TAMRA |
| NAP4 FOR | 5′ TCGGAAGGGCTCCTTCAAA 3′ |
| NAP4 REV | 5′ CACCGTTGCAGCTCTTGGT 3′ |
| MRLP45 | FAM 5′ CTCCCATTCCCCTCATGCTATAAAAAGAACTAC |
| | 3′TAMRA C |
| MRLP45 | 5′ GGCTGCTGGAAGCTTTGAAG 3′ |
| FOR | |
| MRLP45 | 5′ TGAGCAGGATGGGAGAGAACA 3′ |
| REV | |
| TCF2 | FAM 5′ CAAAAGCTGGCCATGGACGCCT 3′TAMRA |
| TCF2 FOR | 5′ GCAGGAAGGAGGAGGCATTC 3′ |
| TCF2 REV | 5′ CAGGCTGTGAGTCTGGTTGGA 3′ |
| ROK1 | FAM 5′ CAGCTGGCTTCCATTTTCCTGGCCT 3′TAMRA |
| ROK1 FOR | 5′ TGGCAAAACTGGGTTCAGAGA 3′ |
| ROK1 REV | 5′ TCGGACGTTGTGGGATGTG 3′ |
| KRT1 | FAM 5′ CCGCCGCCTAATATGCAACATTAGGG 3′TAMRA |
| KRT1 FOR | 5′ CGAGTATTCCAAAGCTGGTATCG 3′ |
| KRT1 REV | 5′ ATCACAGAGAGATGGCCCTTATCT 3′ |
| KRT5 | FAM 5′ CCGCCGCCTAATATGCAACATTAGGG 3′TAMRA |
| KRT5 FOR | 5′ CGAGTATTCCAAAGCTGGTATCG 3′ |
| KRT5 REV | 5′ ATCACAGAGAGATGGCCCTTATCT 3′ |
| KRT8 | FAM 5′ CCGCCGCCTAATATGCAACATTAGGG 3′TAMRA |
| KRT8 FOR | 5′ CGAGTATTCCAAAGGTGGTATCG 3′ |
| KRT8 REV | 5′ ATCACAGAGAGATGGCCCTTATCT 3′ |
| KRT9 | FAM 5′ CCGCCGCCTAATATGCAAGATTAGGG 3′TAMRA |
| KRT9 FOR | 5′ CGAGTATTCCAAAGGTGGTATCG 3′ |
| KRT9 REV | 5′ ATCACAGAGAGATGGCCCTTATCT 3′ |
| KRT10-2 | FAM 5′ CCGCCGCCTAATATGCAACATTAGGG 3′TAMRA |
| KRT10-2 | 5′ CGAGTATTCCAAAGGTGGTATCG 3′ |
| FOR | |
| KRT10-2 | 5′ ATCACAGAGAGATGGCCCTTATCT 3′ |
| REV | |
| KRT14 | FAM 5′ CCGCCGCCTAATATGCAAGATTAGGG 3′TAMRA |
| KRT14 | 5′ CGAGTATTCCAAAGCTGGTATCG 3′ |
| FOR | |
| KRT14 | 5′ ATCACAGAGAGATGGCCCTTATGT 3′ |
| REV | |
| KRT18 | FAM 5′ CGGCCGCCTAATATGCAACATTAGGG 3′TAMRA |
| KRT18 | 5′ CGAGTATTCGAAAGCTGGTATCG 3′ |
| FOR | |
| KRT18 | 5′ ATCACAGAGAGATGGCCCTTATCT 3′ |
| REV | |
| KRT19 | FAM 5′ CCGCCGCCTAATATGCAACATTAGGG 3′TAMRA |
| KRT19 | 5′ CGAGTATTCCAAAGCTGCTATCG 3′ |
| FOR | |
| KRT19 | 5′ ATCACAGAGAGATGGCCCTTATCT 3′ |
| REV | |
| KRT6a/b | FAM 5′ CCGCCGCCTAATATGCAACATTAGGG 3′TAMRA |
| KRT6a/b | 5′ CGAGTATTCCAAAGCTGGTATCG 3′ |
| FOR | |
| KRT6a/b | 5′ ATCACAGAGAGATGGCCCTTATCT 3′ |
| REV | |
| KRT20 | FAM 5′ TGGCGGGAATCCTATTTATCAGACTCTGTAATT |
| | 3′TAMRA GA |
| KRT20 | 5′ GCAAGAAATCAGCCATAAGAAAGC 3′ |
| FOR | |
| KRT20 | 5′ TTGCAGCTCCTGTGAGTAAAACAT 3′ |
| REV | |

TABLE 6

| | | | | | |
|---|---|---|---|---|---|
| No. | ID | forward | reverse | PCR size (bp) | GB ID |

| | | | | | |
|---|---|---|---|---|---|
| 1 | D17S946 | ACAGTCTATCAAGCAGAAAAATCGT | TGCCGTGCCAGAGAGA | 128-142 | Z24029 |
| 2 | D17S1181 | GACAACAGAGCGAGACTCCC | GCCCAGCCTGTCACTTATTC | 122 | — |
| 3 | D17S2026 | TGGTCATTCGACAACGAA | CAGCATTGGATGCAATCC | 171-318 | G05498 X53777 |
| 4 | D17S838 | CTCCAGAATCCAGACCATGA | AGGACAGTGTGTAGCCCTTC | 71-103 | Z51080 |
| 5 | D17S250 | GGAAGAATCAAATAGACAAT | GCTGGCGATATATATATTTAAACC | 151 | — |
| 6 | D17S1818 | CATAGGTATGTTCAGAAATGTGA | TGCCTACTGGAAACCAGA | 119-151 | Z52895 |
| 7 | D17S614 | AAGGGGAAGGGGCTTTCAAAGCT | NGGAGGTTGCAGTGAGCCAAGAT | 136 | L29873 |
| 8 | D17S2019 | CAAAAGCTTATGATGCTCAAACC | TTGTTTCCCTTTGACTTTCTGA | 151-152 | G07286 Z39013 |
| 9 | D17S608 | TAGGTTCACCTCTCATTTTCTTCAG | GTCTGGGTCTTTATGGNGCTTGTG | 136 | L29870 |
| 10 | D17S1655 | CGGACCAGAGTGTTCCATGG | GCATACAGCACCCTCTACCT | 240 | — |
| 11 | D17S2147 | AGGGGAGAATAAATAAAATCTGTGG | CAGGAGTGAGACACTCTCCATG | 138 | G15195 |
| 12 | D17S754 | TGGATTCACTGACTCAGCCTGC | GCGTGTCTGTCTCCATGTGTGC | 145 | — |
| 13 | D17S1814 | TCCCCAATGACGGTGATG | CTGGAGGTTGGCTTGTGGAT | 150-166 | Z52854 |
| 14 | D17S2007 | GGTCCCACGAATTTGCTG | CCACCCAGAAAAACAGGAGA | 102-103 | G07073 X03438 |
| 15 | D17S1246 | TCGATCTCCTGACCTTGTGA | TTGTCACCCCATTGCCTTTC | 115 | — |
| 16 | D17S1979 | CCTTGGATAGATTCAGCTCCC | CTTGTCCCTTCTCAATCCTCC | 199 | G11172 X55068 |
| 17 | D17S1984 | TTAAGCAAGGTTTTAATTAAGCTGC | GATTACAGTGCTCCCTCTCCC | 134 | G14779 T50487 |
| 18 | D17S1984 | GGTTTTAATTAAGCTGCATGGC | GATTACAGTGCTCCCTCTCCC | 126 | G11580 T50487 |
| 19 | D17S1867 | AGTTTGACACTGAGGGCTTTG | TTTAGACTTGGTAACTGCCG | 94 | Z51301 |
| 20 | D17S1788 | TGCAGATGCCTAAGAACTTTTCAG | GCCATGATCTCCCAAAGCC | 156-168 | Z52160 |
| 21 | D17S1836 | TCGAGGTTATGGTGAGCC | AAACTGTGTGTGTCAAAGGATACT | 167-173 | Z53182 |
| 22 | D17S1787 | GCTGATCTGAAGCCAATGA | TACATGAAGGCATGGTCTG | 239-251 | Z52130 |
| 23 | D17S1660 | CTAATATAATGCTGGGCACATGG | GCTGCGGACCAGACAGAT | 201 | G06069 |
| 24 | D17S2154 | GATAAAAACAAGCACTGGCTCC | CCCACGGCTTTCTTGATCTA | 137 | G15440 |
| 25 | D17S1955 | TGTAATGTAAGCCCCATGAGG | CACTCAACTCAACAGTCTAAAGGTG | 180 | G11900 |
| 26 | D17S2098 | GTGAGTTCAAGCATAGTAATTATCC | ATTCAGCCTCAGTTCACTGCTTC | 181 | G13994 |
| 27 | D17S518 | GATCCAGTGGAGACTCAGAG | TAGTCTCTGGGACACCCAGA | 88-100 | X60690 |
| 28 | D17S1851 | ATTCCTGAGTGTCTACCCTGTTGAG | ACTGACTGCGCCACTGC | 237-253 | Z53675 |
| 29 | D11S4358 | TCGAGAAGGACAAAATCACC | GAACAGGGTTAGTCCATTCG | 58 | — |
| 30 | D17S964 | GTTCTTTCCTCTTGTGGGG | AGTCAGCTGAGATTGTGCC | 224 | L36695 |
| 31 | D19S1091 | CAAGCCAAGACATCCCAGTT | CCCCACACACAGCTCATATG | 238 | G14589 |
| 32 | D17S1179 | TTTTCTCTCTCATTCCATTGGG | GCAACAGAGGGAGACTCCAA | 113-125 | — |
| 33 | D10S2160 | TCCCATCCCGTAAGACCTC | TATGGAGTACCTACTCTATGCCAGG | 349 | G06592 |
| 34 | D17S1230 | ATTCAAAGCTGGATCCCTTT | AGCTGTGACAAATGCCTGTA | 108 | L32949 |
| 35 | D17S1338 | TCACCTGAGATTGGGAGACC | AAGATGGGGCAGGAATGG | 178-200 | — |
| 36 | D17S2011 | TCACTGTCCTCCAAGCCAG | AAACACCACACTCTCCCCTG | 115 | G07143 |
| 37 | D17S1237 | TTCTTGGGCTTCCCGTAGCC | GGGGCAGACGACTTCTCCTT | 186 | L32947 |
| 38 | D17S2038 | GGGGATACAACCTTTAAAGTTCC | ATTCACCTAATGAGGATTCTTCTTT | 228 | G6219 |
| 39 | D17S2091 | GCTGAAATAGCCATCTTGAGCTAC | TCCGCATCCTTTTTAAGAGGCAC | 157 | G13941 |
| 40 | D17S649 | CTTTCACTCTTTCAGGTGAAGAGG | TGACGTGCTATTTCCTGTTTTGTCT | 146 | L36685 |
| 41 | D17S1190 | GTTTGTTGCTATGCCTGC | CAACACACTACCCCAGGA | 122 | L18197 |
| 42 | M87506 | ACTCCTCATCTGTAGGGTCT | GAGTCCGCTACCTGAGTGCT | 102-120 | m87506 |

1. A method for the prediction of response to cancer treatment, by the detection of at least 2 markers characterized in that the markers are genes and fragments thereof or genomic nucleic acid sequences that are located on one chromosomal region which is altered in malignant neoplasia.

2. The method of claim 1 wherein the treatment is an antibody treatment, antihormonal treatment, anti-growth factor treatment, taxol based treatment, anthracyclin based treatment and platinum salt based treatment.

3. The method of claim 1 wherein the treatment includes Herceptin™, trastuzumab or 2C4 antibodies.

4. The method of claim 1 characterized in that the markers are:
a) genes that are located on one or more chromosomal region(s) which is/are altered in malignant neoplasia; and
b)
i) receptor and ligand; or
ii) members of the same signal transduction pathway; or
iii) members of synergistic signal transduction pathways; or
iv) members of antagonistic signal transduction pathways; or
v) transcription factor and transcription factor binding site; or
vi) integral parts of heteromeric complexes

5. The method of claim 1 or 2 wherein the malignant neoplasia is breast cancer, ovarian cancer, gastric cancer, colon cancer, esophageal cancer, mesenchymal cancer, bladder cancer or non-small cell lung cancer.

6. The method of any of claims 1 to 5 wherein at least one chromosomal region is defined as the cytogenetic region: 1p13, 1q32, 3p21-p24, 5p13-p14, 8q23-q24, 11q13, 12q13,17q12-q24, 17q11.2-21.3 or 20q13.

7. A method for the prediction, diagnosis or prognosis of malignant neoplasia by the detection of at least one marker characterized in that the marker is selected from:
a) a polynucleotide or polynucleotide analog comprising at least one of the sequences of SEQ ID NO: 319 to 389;
b) a polynucleotide or polynucleotide analog which hybridizes under stringent conditions to a polynucleotide specified in (a) and encodes a polypeptide exhibiting the same biological function as specified for the respective sequence in Table 2 or 3
c) a polynucleotide or polynucleotide analog the sequence of which deviates from the polynucleotide specified in (a) and (c) due to the generation of the genetic code encoding a polypeptide exhibiting the same biological function as specified for the respective sequence in Table 2 or 3
d) a polynucleotide or polynucleotide analog which represents a specific fragment, derivative or allelic variation of a polynucleotide sequence specified in (a) to (d)
e) a purified polypeptide encoded by a polynucleotide or polynucleotide analog sequence specified in (a) to (e)
f) e purified polypeptide comprising at least one of the sequences of SEQ ID NO: 397-467;
Are detected.

8. The method according to any of claims 1 to 6 wherein the markers are selected from:
a) a polynucleotide or polynucleotide analog comprising at least one of the sequences of SEQ ID NO: 2 to 6, 8, 9, 11 to 16, 18, 19, 21 to 26, 53 to 76 or 315 to 389
b) a polynucleotide or polynucleotide analog which hybridizes under stringent conditions to a polynucleotide specified in (a) and encodes a polypeptide exhibiting the same biological function as specified for the respective sequence in Table 2 or 3
c) a polynucleotide or polynucleotide analog the sequence of which deviates from the polynucleotide specified in (a) and (b) due to the generation of the genetic code encoding a polypeptide exhibiting the same biological function as specified for the respective sequence in Table 2 or 3
d) a polynucleotide or polynucleotide analog which represents a specific fragment, derivative or allelic variation of a polynucleotide sequence specified in (a) to (c)
e) a purified polypeptide encoded by a polynucleotide sequence or polynucleotide analog specified in (a) to (d)
f) A purified polypeptide comprising at least one of the sequences of SEQ ID NO: 27 to 52 or 76 to 98 or 393 to 467
are detected.

9. A diagnostic kit for conducting the method of claims 1 to 8.

The application's sequence listing, which the Patent Office published only in electronic form, follows.

SEQUENCE LISTING (512 sequences)

SEQ ID NO: 1 - DNA, 3846 bp, Homo sapiens
gcctcccgccagctcgcctcggggaacaggacgcgcgtgagctcaggcgtccccgccccagcttttctcggaaccatgaaccccaactgcgcccggtgcggcaagatcgtgtatcccacggagaaggtgaactgtctggataagttctggcataaagcatgcttccattgcgagacctgcaagatgacactgaacatgaagaactacaagggctacgagaagaagccctactgcaacgcacactaccccaagcagtccttcaccatggtggcggacaccccggaaaaccttcgcctcaagcaacagagtgagctccagagtcaggtgcgctacaaggaggagtttgagaagaacaagggcaaaggtttcagcgtagtggcagacacgcccgagctccagagaatcaagaagacccaggaccagatcagtaatataaaataccatgaggagtttgagaagagccgcatgggccctagcgggggcgagggcatggagccagagcgtcgggattcacaggacggcagcagctaccggcggcccctggagcagcagcagcctcaccacatcccgaccagtgccccggtttaccagcagccccagcagcagccggtggcccagtcctatggtggctacaaggagcctgcagccccagtctccatacagcgcagcgccccaggtggtggcgggaagcggtaccgcgcggtgtatgactacagcgccgccgacgaggacgaggtctccttccaggacggggacaccatcgtcaacgtgcagcagatcgacgacggctggatgtacgggacggtggagcgcaccggcgacacggggatgctgccggccaactacgtggaggccatctgaacccggagcgcccccatctgtcttcagcacattccacggcatcgcatccgtcctgggcgtgagccgtccattcttcagtgtctctgttttttaaaacctgcgacagcttgtgattcctacccctcttccagcttcttttgccaactgaagccttcttctgccacttctgcgggctccctcctctggcaggcttcccccgtgatcgacttcttggttttctctctggatggaacgggtatgggcctctctgggggaggcagggctggaatgggagacctgttggcctgtgggcctcacctgcccctctgttctctcccctcacatcctcctgcccagctcctcacatacccacacattccagggctggggtgagcctgactgccaggaccccaggtcaggggctccctacattccccagagtgggatccacttcttggttcctgggatggcgatggggactctgccgctgtgtagggaccagtgggatgggctctacctctctttctcaaagagggggctctgcccacctggggtctctctccctacctccctcctcaggggcaacaacaggagaatggggttcctgctgtggggcgaattcatcccctccccgcgcgttccttcgcacactgtgattttgccctcctgcccacgcagacctgcagcgggcaaagagctcccgaggaagcacagcttgggtcaggttcttgcctttcttaattttagggacagctaccggaaggaggggaacaaggagttctcttccgcagcccctttccccacgcccacccccagtctccagggacccttgcctgcctcctaggctggaagccatggtcccgaagtgtagggcaagggtgcctcaggaccttttggtcttcagcctccctcagcccccaggatctgggttaggtggccgctcctccctgctcctcatgggaagatgtctcagagccttccatgacctcccctccccagcccaatgccaagtggacttggagctgcacaaagtcagcagggaccactaaatctccaagacctggtgtgcggaggcaggagcatgtatgtctgcaggtgtctgacacgcaagtgtgtgagtgtgagtgtgagagatggggcgggggtgtgtctgtaggtgtctctgggcctgtgtgtgggtggggttatgtgagggtatgaagagctgtcttcccctgagagtttcctcagaacccacagtgagaggggagggctcctggggcagagaagttccttaggttttctttggaatgaaattcctccttccccccatctctgagtggaggaagcccaccaatctgccctttgcagtgtgtcagggtggaaggtaagaggttggtgtggagttggggctgccatagggtctgcagcctgctggggctaagcggtggaggaaggctctgtcactccaggcatatgtttccccatctctgtctggggctacagaatagggtggcagaagtgtcaccctgtgggtgtctccctcgggggctcttcccctagacctccccctcacttacataaagctcccttgaagcaagaaagagggtcccagggctgcaaaactggaagcacagcctcggggatggggagggaaagacggtgctatatccagttcctgctctctgctcatgggtggctgtgacaaccctggcctcacttgattcatctctggttttcttgccaccctctgggagtccccatcccattttcatcctgagcccaaccaggccctgccattggcctcttgtcccttggcacacttgtacccacaggtgaggggcaggacctgaaggtattggcctgttcaacaatcagtcatcatgggtgtttttgtcaactgcttgttaattgatttggggatgtttgccccgaatgagaggttgaggaaaagactgtgggtggggaggccctgcctgacccatcccttttcctttctggccccagcctaggtggaggcaagtggaatatcttatattgggcgatttgggggctcggggaggcagagaatctcttgggagtcttgggtggcgctggtgcattctgtttcctcttgatctcaaagcacaatgtggatttggggaccaaaggtcagggacacatccccttagaggacctgagtttgggagagtggtgagtggaagggaggagcagcaagaagcagcctgttttcactcagcttaattctccttcccagataaggcaagccagtcatggaatcttgctgcaggccctccctctactcttcctgtcctaaaaataggggccgttttcttacacacccccagagagaggagggactgtcacactggtgctgagtgaccgggggctgctgggcgtctgttctttaccaaaaccatccatccctagaagagcacagagccctgaggggctgggctgggctgggctgagcccctggtcttctctacagttcacagaggtctttcagctcatttaatcccaggaaagaggcatcaaagctagaatgtgaatataacttttgtgggccaatactaagaataacaagaagcccagtggtgaggaaagtgcgttctcccagcactgcctcctgttttctccctctcatgtccctccagggaaaatgactttattgcttaatttctgcctttcccccctcacacatgcacttttgggcctttttttatagctggaaaaaacaaaataccaccctacaaacctgtatttaaaaagaaacagaaatgaccacgtgaaatttgcctctgtccaaacatttcatccgtgtgtatgtgtatgtgtgtgagtgtgtgaagccgccagttcatctttttatatggggttgttgtctcattttggtctgttttggtcccctccctcgtgggcttgtgctcgggatcaaacctttctggcctgttatgattctgaacatttgacttgaaccacaagtgaatctttctcctggtgactcaaataaaagtataattttta

SEQ ID NO: 2 - DNA, 1711 bp, Homo sapiens
gagggaaggcaggaaggaggcagccgaaggccgagctgggtggctggaccgggtgctggctgcgcgcgctgctttcggctcccacggcctctcccatgcgctgagggagcccggctgcgggccggcggcgggaggggaggctcctctccatggtccagaagaccagcatgtcccggggcccttacccaccctcccaggagatccccatggaggtcttcgaccccagcccgcagggcaaatacagcaagaggaaagggcgattcaaacggtcagatgggagcacgtcctcggataccacatccaacagctttgtccgccagggctcagcggagtcctacaccagccgtccatcagactctgatgtatctctggaggaggaccgggaagccttaaggaaggaagcagagcgccaggcattagcgcagctcgagaaggccaagaccaagccagtggcatttgctgtgcggacaaatgttggctacaatccgtctccaggggatgaggtgcctgtgcagggagtggccatcaccttcgagcccaaagacttcctgcacatcaaggagaaatacaataatgactggtggatcgggcggctggtgaaggagggctgtgaggttggcttcattcccagccccgtcaaactggacagccttcgcctgctgcaggaacagaagctgcgccagaaccgcctcggctccagcaaatcaggcgataactccagttccagtctgggagatgtggtgactggcacccgccgccccacaccccctgccagtgccaaacagaagcagaagtcgacagagcatgtgcccccctatgacgtggtgccttccatgaggcccatcatcctggtgggaccgtcgctcaagggctacgaggttacagacatgatgcagaaagctttatttgacttcttgaagcatcggtttgatggcaggatctccatcactcgtgtgacggcagatatttccctggctaagcgctcagttctcaacaaccccagcaaacacatcatcattgagcgctccaacacacgctccagcctggctgaggtgcagagtgaaatcgagcgaatcttcgagctggcccggacccttcagttggtcgctctggatgctgacaccatcaatcacccagcccagctgtccaagacctcgctggcccccatcattgtttacatcaagatcacctctcccaaggtacttcaaaggctcatcaagtcccgaggaaagtctcagtccaaacacctcaatgtccaaatagcggcctcggaaaagctggcacagtgcccccctgaaatgtttgacatcatcctggatgagaaccaattggaggatgcctgcgagcatctggcggagtacttggaagcctattggaaggccacacacccgcccagcagcacgccacccaatccgctgctgaaccgcaccatggctaccgcagccctgcgccgtagccctgcccctgtctccaacctccaggtacaggtgctcacctcgctcaggagaaacctcggcttctggggcgggctggagtcctcacagcggggcagtgtggtgccccaggagcaggaacatgccatgtagtgggcgccctgcccgtcttccctcctgctctggggtcggaactggagtgcagggaacatggaggaggaagggaagagctttattttgtaaaaaaataagatgagcggcaaaaaaaaaaaaaaaaa

SEQ ID NO: 3 - DNA, 698 bp, Homo sapiens
ttttcctttcgctgctgcggccgcagccatgagtatgctcaggcttcagaagaggctcgcctctagtgtcctccgctgtggcaagaagaaggtctggttagaccccaatgagaccaatgaaatcgccaatgccaactcccgtcagcagatccggaagctcatcaaagatgggctgatcatccgcaagcctgtgacggtccattcccgggctcgatgccggaaaaacaccttggcccgccggaagggcaggcacatgggcataggtaagcggaagggtacagccaatgcccgaatgccagagaaggtcacatggatgaggagaatgaggattttgcgccggctgctcagaagataccgtgaatctaagaagatcgatcgccacatgtatcacagcctgtacctgaaggtgaaggggaatgtgttcaaaaacaagcggattctcatggaacacatccacaagctgaaggcagacaaggcccgcaagaagctcctggctgaccaggctgaggcccgcaggtctaagaccaaggaagcacgcaagcgccgtgaagagcgcctccaggccaagaaggaggagatcatcaagactttatccaaggaggaagagaccaagaaataaaacctcccactttgtctgtacatactggcctctgtgattacatagatcagccattaaaataaaacaagccttaatctgc

SEQ ID NO: 4 - DNA, 5810 bp, Homo sapiens
gggaagatggcggcggcctcgagcaccctcctcttcttgccgccggggacttcagattgatccttcccgggaagagtagggactgctggtgccctgcgtcccgggatcccgagccaacttgtttcctccgttagtggtggggaagggcttatccttttgtggcggatctagcttctcctcgccttcaggatgaaagctcaggggggaaaccgaggagtcagaaaagctgagtaagatgagttctctcctggaacggctccatgcaaaatttaaccaaaatagaccctggagtgaaaccattaagcttgtgcgtcaagtcatggagaagagggttgtgatgagttctggagggcatcaacatttggtcagctgtttggagacattgcagaaggctctcaaagtaacatctttaccagcaatgactgatcgtttggagtccatagcaggacagaatggactgggctctcatctcagtgccagtggcactgaatgttacatcacgtcagatatgttctatgtggaagtgcagttagatcctgcaggacagctttgtgatgtaaaagtggctcaccatggggagaatcctgtgagctgtccggagcttgtacagcagctaagggaaaaaaattctgatgaattttctaagcaccttaagggccttgttaatctgtataaccttccaggggacaacaaactgaagactaaaatgtacttggctctccaatccttagaacaagatctttctaaaatggcaattatgtactggaaagcaactaatgctggtcccttggataagattcttcatggaagtgttggctatctcacaccaaggagtgggggtcatttaatgaacctgaagtactatgtctctccttctgacctactggatgacaagactgcatctcccatcattttgcatgagaataatgtttctcgatctttgggcatgaatgcatcagtgacaattgaaggaacatctgctgtgtacaaactcccaattgcaccattaattatggggtcacatccagttgacaataaatggaccccttccttctcctcaatcaccagtgccaacagtgttgatcttcctgcctgtttcttcttgaaatttccccagccaatcccagtatctagagcatttgttcagaaactgcagaactgcacaggaattccattgtttgaaactcaaccaacttatgcacccctgtatgaactgatcactcagtttgagctatcaaaggaccctgaccccatacctttgaatcacaacatgagattttatgctgctcttcctggtcagcagcactgctatttcctcaacaaggatgctcctcttccagatggccgaagtctacagggaacccttgttagcaaaatcacctttcagcaccctggccgagttcctcttatcctaaatctgatcagacaccaagtggcctataacaccctcattggaagctgtgtcaaaagaactattctgaaagaagattctcctgggcttctccaatttgaagtgtgtcctctctcagagtctcgtttcagcgtatcttttcagcaccctgtgaatgactccctggtgtgtgtggtaatggatgtgcagggcttaacacatgtgagctgtaaactctacaaagggctgtcggatgcactgatctgcacagatgacttcattgccaaagttgttcaaagatgtatgtccatccctgtgacgatgagggctattcggaggaaagctgaaaccattcaagccgacaccccagcactgtccctcattgcagagacagttgaagacatggtgaaaaagaacctgcccccggctagcagcccagggtatggcatgaccacaggcaacaacccaatgagtggtaccactacatcaaccaacacctttccggggggtcccattgccaccttgtttaatatgagcatgagcatcaaagatcggcatgagtcggtgggccatggggaggacttcagcaaggtgtctcagaacccaattcttaccagtttgttgcaaatcacagggaacggggggtctaccattggctcgagtccgacccctcctcatcacacgccgccacctgtctcttcgatggccggcaacaccaagaaccacccgatgctcatgaaccttctcaaagataatcctgcccaggatttctcaaccctttatggaagcagccctttagaaaggcagaactcctcttccggctcaccccgcatggaaatatgctcggggagcaacaagaccaagaaaaagaagtcatcaagattaccacctgagaaaccaaagcaccagactgaagatgactttcagagggagctattttcaatggatgttgactcacagaaccctatctttgatgtcaacatgacagctgacacgctggatacgccacacatcactccagctccaagccagtgtagcactcccccaacaacttacccacaaccagtacctcacccccaacccagtattcaaaggatggtccgactatccagttcagacagcattggcccagatgtaactgacatcctttcagacattgcagaagaagcttctaaacttcccagcactagtgatgattgcccagccattggcacccctcttcgagattcttcaagctctgggcattctcagagtaccctgtttgactctgatgtctttcaaactaacaataatgaaaatccatacactgatccagctgatcttattgcagatgctgctggaagccccagtagtgactctcctaccaatcatttttttcatgatggagtagatttcaatcctgatttattgaacagccagagccaaagtggttttggagaagaatattttgatgaaagcagccaaagtggggataatgatgatttcaaaggatttgcatctcaggcactaaatactttgggggtgccaatgcttggaggtgataatggggagaccaagtttaagggcaataaccaagccgacacagttgatttcagtattatttcagtagccggcaaagctttagctcctgcagatcttatggagcatcacagtggtagtcagggtcctttactgaccactggggacttagggaaagaaaagactcaaaagagggtaaaggaaggcaatggcaccagtaatagtactctctcggggcccggattagacagcaaaccagggaagcgcagtcggaccccttctaatgatgggaaaagcaaagataagcctccaaagcggaagaaggcagacactgagggaaagtctccatctcatagttcttctaacagaccttttaccccacctaccagtacaggtggatctaaatcgccaggcagtgcaggaagatctcagactcccccaggtgttgccacaccacccattcccaaaatcactattcagattcctaagggaacagtgatggtgggcaagccttcctctcacagtcagtataccagcagtggttctgtgtcttcctcaggcagcaaaagccaccatagccattcttcctcctcttcctcatctgcttccacctcagggaagatgaaaagcagtaaatcagaaggttcatcaagttccaagttaagtagcagtatgtattctagccaggggtcttctggatctagccagtccaaaaattcatcccagtctggggggaagccaggctcctctcccataaccaagcatggactgagcagtggctctagcagcaccaagatgaaacctcaaggaaagccatcatcacttatgaatccttctttaagtaaaccaaacatatccccttctcattcaaggccacctggaggctctgacaagcttgcctctccaatgaagcctgttcctggaactcctccatcctctaaagccaagtcccctatcagttcaggttctggtggttctcatatgtctggaactagttcaagctctggcatgaagtcatcttcagggttaggatcctcaggctcgttgtcccagaaaactcccccatcatctaattcctgtacggcatcttcctcctccttttcctcaagtggctcttccatgtcatcctctcagaaccagcatgggagttctaaaggaaaatctcccagcagaaacaagaagccgtccttgacagctgtcatagataaactgaagcatggggttgtcaccagtggccctgggggtgaagacccactggacggccagatgggggtgagcacaaattcttccagccatcctatgtcctccaaacataacatgtcaggaggagagtttcagggcaagcgtgagaaaagtgataaagacaaatcaaaggtttccacctccgggagttcagtggattcttctaagaagacctcagagtcaaaaaatgtggggagcacaggtgtggcaaaaattatcatcagtaagcatgatggaggctcccctagcattaaagccaaagtgactttgcagaaacctggggaaagtagtggagaagggcttaggcctcaaatggcttcttctaaaaactatggctctccactcatcagtggttccactccaaagcatgagcgtggctctcccagccatagtaagtcaccagcatataccccccagaatctggacagtgaaagtgagtcaggctcctccatagcagagaaatcttatcagaatagtcccagctcagacgatggtatccgaccacttccagaatacagcacagagaaacataagaagcacaaaaaggaaaagaagaaagtaaaagacaaagatagggaccgagaccgggacaaagaccgagacaagaaaaaatctcatagcatcaagccagagagttggtccaaatcacccatctcttcagaccagtccttgtctatgacaagtaacacaatcttatctgcagacagaccctcaaggctcagcccagactttatgattggggaggaagatgatgatcttatggatgtggccctgattgggaattaggaaccttatttcctaaaagaaacagggccagaggaaaaaaaactattgataagtttataggcaaaccaccataaggggtgagtcagacaggtctgatttggttaagaatcctaaatggcatggctttgacatcaagctgggtgaattagaaaggcatatccagaccctattaaagaaaccacagggtttgattctggttaccaggaagtcttctttgttcctgtgccagaaagaaagttaaaatacttgcttaagaaagggaggggggtgggaggggtgtagggagagggaagggagggaaacagttttgtgggaaatattcatatatattttcttctccctttttccatttttaggccatgttttaaactcattttagtgcatgtatatgaagggctgggcagaaaatgaaaaagcaatacattccttgatgcatttgcatgaaggttgttcaactttgtttgaggtagttgtccgtttgagtcatgggcaaatgaaggactttggtcattttggacacttaagtaatgtttggtgtctgtttcttaggagtgactgggggagggaagattattttagctatttatttgtaatattttaaccctttatctgtttgtttttatacagtgtttcgttctaaatctatgaggtttagggttcaaaatgatggaaggccgaagagcaaggcttatatggtggtagggagcttatagcttgtgctaatactgtagcatcaagcccaagcaaattagtcagagcccgcctttagagttaaatataatagaaaaaccaaaatgatatttttattttaggagggtttaaatagggttcagagatcataggaatattaggagttacctctctgtggaggtat

SEQ ID NO: 5 - DNA, 5515 bp, Homo sapiens
cttttttcccttcttcaggtcaggggaaagggaatgcccaattcagagagacatgggggcaagaaggacgggagtggaggagcttctggaactttgcagccgtcatcgggaggcggcagctctaacagcagagagcgtcaccgcttggtatcgaagcacaagcggcataagtccaaacactccaaagacatggggttggtgacccccgaagcagcatccctgggcacagttatcaaacctttggtggagtatgatgatatcagctctgattccgacaccttctccgatgacatggccttcaaactagaccgaagggagaacgacgaacgtcgtggatcagatcggagcgaccgcctgcacaaacatcgtcaccaccagcacaggcgttcccgggacttactaaaagctaaacagaccgaaaaagaaaaaagccaagaagtctccagcaagtcgggatcgatgaaggaccggatatcgggaagttcaaagcgttcgaatgaggagactgatgactatgggaaggcgcaggtagccaaaagcagcagcaaggaatccaggtcatccaagctccacaaggagaagaccaggaaagaacgggagctgaagtctgggcacaaagaccggagtaaaagtcatcgaaaaagggaaacacccaaaagttacaaaacagtggacagcccaaaacggagatccaggagcccccacaggaagtggtctgacagctccaaacaagatgatagcccctcgggagcttcttatggccaagattatgaccttagtccctcacgatctcatacctcgagcaattatgactcctacaagaaaagtcctggaagtacctcgagaaggcagtcggtcagtcccccttacaaggagccttcggcctaccagtccagcacccggtcaccgagcccctacagtaggcgacagagatctgtcagtccctatagcaggagacggtcgtccagctacgaaagaagtggctcttacagcgggcgatcgcccagtccctatggtcgaaggcggtccagcagccctttcctgagcaagcggtctctgagtcggagtccactccccagtaggaaatccatgaagtccagaagtagaagtcctgcatattcaagacattcatcttctcatagtaaaaagaagagatccagttcacgcagtcgtcattccagtatctcacctgtcaggcttccacttaattccagtctgggagctgaactcagtaggaaaaagaaggaaagagcagctgctgctgctgcagcaaagatggatggaaaggagtccaagggttcacctgtatttttgcctagaaaagagaacagttcagtagaggctaaggattcaggtttggagtctaaaaagttacccagaagtgtaaaattggaaaaatctgccccagatactgaactggtgaatgtaacacatctaaacacagaggtaaaaaattcttcagatacagggaaagtaaagttggatgagaactccgagaagcatcttgttaaagatttgaaagcacagggaacaagagactctaaacccatagcactgaaagaggagattgttactccaaaggagacagaaacatcagaaaaggagacccctccacctcttcccacaattgcttctcccccaccccctctaccaactactacccctccacctcagacaccccctttgccacctttgcctccaataccagctcttccacagcaaccacctctgcctccttctcagccagcatttagtcaggttcctgcttccagtacttcaactttgcccccttctactcactcaaagacatctgctgtgtcctctcaggcaaattctcagccccctgtacaggtttctgtgaagactcaagtatctgtaacagctgctattccacacctgaaaacttcaacgttgcctcctttgcccctcccacccttattacctggaggtgatgacatggatagtccaaaagaaactcttccttcaaaacctgtgaagaaagagaaggaacagaggacacgtcacttactcacagaccttcctctccctccagagctccctggtggagatctgtctcccccagactctccagaaccaaaggcaatcacaccacctcagcaaccatataaaaagagaccaaaaatttgttgtcctcgttatggagaaagaagacaaacagaaagcgactgggggaaacgctgtgtggacaagtttgacattattgggattattggagaaggaacctatggccaagtatataaagccagggacaaagacacaggagaactagtggctctgaagaaggtgagactagacaatgagaaagagggcttcccaatcacagccattcgtgaaatcaaaatccttcgtcagttaatccaccgaagtgttgttaacatgaaggaaattgtcacagataaacaagatgcactggatttcaagaaggacaaaggtgccttttaccttgtatttgagtatatggaccatgacttaatgggactgctagaatctggtttggtgcacttttctgaggaccatatcaagtcgttcatgaaacagctaatggaaggattggaatactgtcacaaaaagaatttcctgcatcgggatattaagtgttctaacattttgctgaataacagtgggcaaatcaaactagcagattttggacttgctcggctctataactctgaagagagtcgcccttacacaaacaaagtcattactttgtggtaccgacctccagaactactgctaggagaggaacgttacacaccagccatagatgtttggagctgtggatgtattcttggggaactattcacaaagaagcctatttttcaagccaatctggaactggctcagctagaactgatcagccgactttgtggtagcccttgtccagctgtgtggcctgatgttatcaaactgccctacttcaacaccatgaaaccgaagaagcaatatcgaaggcgtctacgagaagaattctctttcattccttctgcagcacttgatttattggaccacatgctgacactagatcctagtaagcggtgcacagctgaacagaccctacagagcgacttccttaaagatgtcgaactcagcaaaatggctcctccagacctcccccactggcaggattgccatgagttgtggagtaagaaacggcgacgtcagcgacaaagtggtgttgtagtcgaagagccacctccatccaaaacttctcgaaaagaaactacctcagggacaagtactgagcctgtgaagaacagcagcccagcaccacctcagcctgctcctggcaaggtggagtctggggctggggatgcaataggccttgctgacatcacacaacagctgaatcaaagtgaattggcagtgttattaaacctgctgcagagccaaaccgacctgagcatccctcaaatggcacagctgcttaacatccactccaacccagagatgcagcagcagctggaagccctgaaccaatccatcagtgccctgacggaagctacttcccagcagcaggactcagagaccatggccccagaggagtctttgaaggaagcaccctctgccccagtgatcctgccttcagcagaacagatgacccttgaagcttcaagcacaccagctgacatgcagaatatattggcagttctcttgagtcagctgatgaaaacccaagagccagcaggcagtctggaggaaaacaacagtgacaagaacagtgggccacaggggccccgaagaactcccacaatgccacaggaggaggcagcagcatgtcctcctcacattcttccaccagagaagaggccccctgagccccccggacctccaccgccgccacctccaccccctctggttgaaggcgatctttccagcgccccccaggagttgaacccagccgtgacagccgccttgctgcaacttttatcccagcctgaagcagagcctcctggccacctgccacatgagcaccaggccttgagaccaatggagtactccacccgaccccgtccaaacaggacttatggaaacactgatgggcctgaaacagggttcagtgccattgacactgatgaacgaaactctggtccagccttgacagaatccttggtccagaccctggtgaagaacaggaccttctcaggctctctgagccaccttggggagtccagcagttaccagggcacagggtcagtgcagtttccaggggaccaggacctccgttttgccagggtccccttagcgttacacccggtggtcgggcaaccattcctgaaggctgagggaagcagcaattctgtggtacatgcagagaccaaattgcaaaactatggggagctggggccaggaaccactggggccagcagctcaggagcaggccttcactgggggggcccaactcagtcttctgcttatggaaaactctatcgggggcctacaagagtcccaccaagagggggaagagggagaggagttccttactaacccagagacttcagtgtcctgaaagattcctttcctatccatccttccatccagttctctgaatctttaatgaaatcatttgccagagcgaggtaatcatctgcatttggctactgcaaagctgtccgttgtattccttgctcacttgctactagcaggcgacttaggaaataatgatgttggcaccagttccccctggatgggctatagccagaacatttacttcaactctaccttagtagatacaagtagagaatatggagaggatcattacattgaaaagtaaatgttttattagttcattgcctgcacttactggtcggaagagagaaagaacagtttcagtattgagatggctcaggagaggctctttgatttttaaagttttggggtggggggttgtgtgtggtttctttcttttgaattttaatttaggtgttttgggtttttttcctttaaagagaatagtgttcacaaaatttgagctgctctttggcttttgctataagggaaacagagtggcctggctgatttgaataaatgtttctttcctctccaccatctcacattttgcttttaagtgaacactttttccccattgagcatcttgaacatactttttttccaaataaattactcatccttaaagtttactccactttgacaaaagatacgcccttctccctgcacataaagcaggttgtagaacgtggcattcttgggcaagtaggtagactttacccagtctctttccttttttgctgatgtgtgctctctctctctctttctctctctctctctctctctctctctctctgtctgtctcgcttgctcgctctcgctgtttctctctctttgaggcatttgtttggaaaaaatcgttgagatgcccaagaacctgggataattctttactttttttgaaataaaggaaaggaaattcaaaaaaaaaaaaaaaaaaaaaaaaaaaaaaaaaaaaaaaaaaaaaaaaaaaaaaaaaaaaaaaaaa

SEQ ID NO: 6 - DNA, 6131 bp, Homo sapiens
gaattctaggcccagttctgtgtttcccctgtgtgttcctaggcaggtcagtttccctccatgggcctctgtaagatgaggagttggagaggtacattctcaggctactttcaactcccagccaagtgactcaagagtcccaggcagcaccagcacccctatctccaaggcctcctgatgtgtgtctctatttagaacttaatccaacctacccaacatcagatcagtgtcttaccagcccaaggtccctggggagcctcctagagggagagagccctgcccacccagattgagggtaaaggcctccccgtgctcatttttgtaccaccacagtgcttggcacatggtagacatcaaaatgtgtgtgctgaaagtataattgaagttgtgtatatatgtcagctagagtgtctggaggggcagaaatgtgggtctaaaacatacaaatgctccaaatggggtgtgggcaagggtctgtctacaccaggctgtgattacctgctcacatacatgtgtctatctgagtaggggtatgttatctatttttctacaccacagggtgaggaacaggtatatgtgtgcatgtgtatgcatccgtgtgtgtgtgtatgtgtgtgtgcatgagtgtgtgtgtgtgtgtccaaagccacctcttcaacctgtgccatttgtatctgtgtctggcccaatgagagtgttgaaaggtgagccacaagataaaacagcaacttcctacctcccttatcaagacagctgtctgacctacctccccttggccactcttgggattactggggttggcttcagtattttcagatttttcagaaggggaggagaatgcttgagtctcatccaggaacttaggcagttctcagcactgcctgctcctcctccctcaaataaccaagtctgaagaccaggagagaaagccgctggtggactggtcacctgtctggcagtgggaggaggagagtgagaggtttctaggtaggaatccagacttagaccctcccctccacccccagatgggtggtgcacaggctcatctcgcggcccctccccactccaccctaacatggatacgcccccaacaaccaaggaaagatctcccatcggctgactccacagatacacacatgtccccacagacacacacacgcccatgcagaggcacagacatccaggcacatctttccctttctctgtctttcccttggtttgaatttcgtttagccacatatgttgtgtgtgcgtgagggtgggtgggggaggggcagacagggatgagggatggcatggtgccaacatctacctatggggctcgggccagggacgccccttacagccatcctgggagggggtctcagctgtccctttgtggccaaggggaccctcctggggagtgggggcaagcacagaggtcctttctccccaacccggggtctggtccctgacccaccttgggggcctgcaggggaggaaatggacagagcgggaccctgagggagcatagaattggccaccacgagcccccagtgtccagccttgccaccccattgttcccgtgagggggtctctatatacagggggcaactcctcccaccttcctctcaatccctgctttccctgcgttgggcggggaggggagggcggcagaaatatttatttatttcctttatttatttaattttttttttttttttttggagtagagagtgacagatggcggcgggtcccgggggagccggctctcccccagtgcagacgcatgccaatcaccgtctctcatgtgatagctgctgcccgtgacgtgccaagcccatatggcctggcatagaggctggtaccccgcctggtagagatgccacactcgctccgcggttcgcatggcgctctgaagacgccggcgcccgccgccttgaggagccgctgcccccgctccctgaagatgggggaacaatgaaataagcgagaagatccctcttctcccccctctctctcttgccccctccccccctcccctcccctctccccttgactcctctccgaggtaagttgtccgaaagggagcgagatctgacccgccggttgggaggaggggcggcagcttcggccgacaggagggtcctcaaatacctccttcctgggatgatgcccccctcattgggtgggcatcggaggggccccaggttctctctcccttaggggctgcagcccagggggctgcagaggaggtgtctctgcctgcgatgggctcggtggggggggaaggcaggatcacggagggggatatgcgaagaggccgagacggaggacccctccatggttgtcccaaaaagcctgccacctttccccaccaccgaaaaaagggaagcaaacaaacaaatttggatttttcccccatcaatcccaaaatacaacgagatctgaagagccttgtgggagggagtcagcttgaagggggaagggggtccctgaccgcagaggggacggactgggctcgcttctctcagtctcctccccacgccccgctgcttcagtcctcgccgcccagagccggctccgggagctggggacgcatcggctagaggagacgatcctcccgcctctggaattgggggtgcgggggtgggggccgagcaaggggcggcgcgcagccaagttgcaaattggattagggagcgtgggggtgagagccacgggaggggtgagggagctgggccggggggcccgggccgcgagagcgcggagcggggcagctgtccccaccggcggccgaccagcctctctccaccgccaggagagaacgggctttcagggcgagcgcgccgcctcccctggcaaagatatctggtccctaaaacccccacccggtccctgccctgaccctgagaagaagcaggcgcggggagcagccccccattcaagcgaggggcggagccggggcccagcgccggggagagggcctgggccgagatcccaggccggcagccgggtagggctgggccggctctgggcggggcaggcggcggaggtgggcatccagggtagcctaggcaggagcccgcacgagactcgggggtggaggagggttgtgggggggcgtcggtaccccagcgcgcccctcactttgtgctgtctgtctccccttcccgcccgcggggcgccctcaggcaccatgctgacccgcctgttcagcgagcccggccttctctcggacgtgcccaagttcgccagctggggcgacggcgaagacgacgagccgaggagcgacaagggcgacgcgccgccaccgccaccgcctgcgcccgggccaggggctccggggccagcccgggcggccaagccagtccctctccgtggagaagaggggacggaggccacgttggccgaggtcaaggaggaaggcgagctggggggagaggaggaggaggaagaggaggaggaagaaggactggacgaggcggagggcgagcggcccaagaagcgcgggcccaagaagcgcaagatgaccaaggcgcgcttggagcgctccaagcttcggcggcagaaggcgaacgcgcgggagcgcaaccgcatgcacgacctgaacgcagccctggacaacctgcgcaaggtggtgccctgctactccaagacgcagaagctgtccaagatcgagacgctgcgcctagccaagaactatatctgggcgctctcggagatcctgcgctccggcaagcggccagacctagtgtcctacgtgcagactctgtgcaagggtctgtcgcagcccaccaccaatctggtggccggctgtctgcagctcaactctcgcaacttcctcacggagcaaggcgccgacggtgccggccgcttccacggctcgggcggcccgttcgccatgcacccctacccgtacccgtgctcgcgcctggcgggcgcacagtgccaggcggccggcggcctgggcggcggcgcggcgcacgccctgcggacccacggctactgcgccgcctacgagacgctgtatgcggcggcaggcggtggcggcgcgagcccggactacaacagctccgagtacgagggcccgctcagccccccgctctgtctcaatggcaacttctcactcaagcaggactcctcgcccgaccacgagaaaagctaccactactctatgcactactcggcgctgcccggttcgcgccacggccacgggctagtcttcggctcgtcggctgtgcgcgggggcgtccactcggagaatctcttgtcttacgatatgcaccttcaccacgaccggggccccatgtacgaggagctcaatgcgttttttcataactgagacttcgcgccggctcccttctttttcttttgcctttgcccgcccccctgtccccagcccccagcagcgcagggtacacccccatcctaccccggcgccgggcgcggggagcgggccaccggtcctgccgctctcctggggcagcgcagtcctgttacctgtgggtggcctgtcccaggggcctcgcttcccccaggggactcgccttctctctccccaaggggttccctcctcctctctcccaaggagtgcttctccagggacctctctccgggggctccctggaggcacccctcccccattcccaatatcttcgctgaggtttcctcctccccctcctccctgcaggcccaaggcgttggtaagggggcagctgagcaatggaacgcgtttccccctctcattattattttaaaaacagacacccagctgccgaggcaaaaaggagccaggcgctccctctttcttgaagagggtagtattttgggcgccggagcccgggcctggaacgccctcacccgcaacctccagtctccgcgttttgcgattttaattttggcgggaggggaagtggattgagaggaaagagagaggccaagacaatttgtaactagaatccgtttttcccttttcctttttttaaacaaacaaacatacaaaaaaaaaaaaaaaaaaaaaaaaaaaaaaagctaagaggcgacggaagccgaacgcagagtccggatcggagagaaaacgcagtaaggacttttagaagcaataaaaggcaaaaaaaacaaaaaacaaaaaaacaaacaaaaaaaaaccactactaccaataatcaaagacacaaatatctatgcaaggaggctccactgagcctcgcggcccggcccggccccgggatgccccgcccggcctgcgggccgccccgcccgagcgcggatctgtgcactttggtgaagtgggggcccgcgccgccccctccccctccccaggttcttacaatcagtgactcggagatttggggccccagtgccactgccctcccccgccccgtccccgttgtgcgtcatgctgttttttaaaaacctgtttccaaatttgtatggaatggcaaactgttggggggtcggtttggggagggagggtttgcatgaaagacacacgcacaccacaccgcacgcacaagcaggcccggcgccggcgtccggggggcagaaggaggtgagctcgccggctcctcctccccgcggccattctgtcccctcctggggtgaggggtggggatggagacctgggggcagccccacccctgcccggactgtgcctcggtgggtgccacctggcgatttccggtgtctggagagagtattttttggtccaaggagtcctcttggctttagctggtgggtgggcggggagaggtctgagggctcctactggaggttcccccaaaaaggggcaaaaggagaccctctgcccaccggaggcaggggatcaggcatccaaatacacgatgcaaaaatgcaatcccacaggcgacacacccacacactcacccacacacacgcaattttaccttcctcttgtagcgaagatgaaactcccgtcggacacccgaagtgcattgcgtgtttctgttcagtttaatgacgattaataaatatttatgtaaatgagatgcaaagccggaccggtttctcacggtggcctcatttcattgaggggggagagaaggtttgagctggggctggggtgatgaaggcagagtgtcaagtgactgtgcagaggccaaacagagggacttcccagcaaaaagcactg

SEQ ID NO: 7 - DNA, 2020 bp, Homo sapiens
gctactgaggccgcggagccggactgcggttggggcgggaagagccggggccgtggctgacatggagcagccctgctgctgaggccgcgccctccccgccctgaggtgggggcccaccaggatgagcaagctgcccagggagctgacccgagacttggagcgcagcctgcctgccgtggcctccctgggctcctcactgtcccacagccagagcctctcctcgcacctccttccgccgcctgagaagcgaagggccatctctgatgtccgccgcaccttctgtctcttcgtcaccttcgacctgctcttcatctccctgctctggatcatcgaactgaataccaacacaggcatccgtaagaacttggagcaggagatcatccagtacaactttaaaacttccttcttcgacatctttgtcctggccttcttccgcttctctggactgctcctaggctatgccgtgctgcagctccggcactggtgggtgattgcggtcacgacgctggtgtccagtgcattcctcattgtcaaggtcatcctctctgagctgctcagcaaaggggcatttggctacctgctccccatcgtctcttttgtcctcgcctggttggagacctggttccttgacttcaaagtcctaccccaggaagctgaagaggagcgatggtatcttgccgcccaggttgctgttgcccgtggacccctgctgttctccggtgctctgtccgagggacagttctattcacccccagaatcctttgcagggtctgacaatgaatcagatgaagaagttgctgggaagaaaagtttctctgctcaggagcgggagtacatccgccaggggaaggaggccacggcagtggtggaccagatcttggcccaggaagagaactggaagtttgagaagaataatgaatatggggacaccgtgtacaccattgaagttccctttcacggcaagacgtttatcctgaagaccttcctgccctgtcctgcggagctcgtgtaccaggaggtgatcctgcagcccgagaggatggtgctgtggaacaagacagtgactgcctgccagatcctgcagcgagtggaagacaacaccctcatctcctatgacgtgtctgcaggggctgcgggcggcgtggtctccccaagggacttcgtgaatgtccggcgcattgagcggcgcagggaccgatacttgtcatcagggatcgccacctcacacagtgccaagcccccgacgcacaaatatgtccggggagagaatggccctgggggcttcatcgtgctcaagtcggccagtaacccccgtgtttgcacctttgtctggattcttaatacagatctcaagggccgcctgccccggtacctcatccaccagagcctcgcggccaccatgtttgaatttgcctttcacctgcgacagcgcatcagcgagctgggggcccgggcgtgactgtgccccctcccaccctgcgggccagggtcctgtcgccaccacttccagagccagaaagggtgccagttgggctcgcactgcccacatgggacctggccccaggctgtcaccctccaccgagccacgcagtgcctggagttgactgactgagcaggctgtggggtggagcactggactccggggccccactggctggaggaagtggggtctggcctgttgatgtttacatggcgccctgcctcctggaggaccagattgctctgccccaccttgccagggcagggtctgggctgggcacctgacttggctggggaggaccagggccctgggcagggcagggcagcctgtcacccgtgtgaagatgaaggggctcttcatctgcctgcgctctcgtcggtttttttaggattattgaaagagtctgggacccttgttggggagtgggtggcaggtgggggtgggctgctggccatgaatctctgcctctcccaggctgtccccctcctcccagggcctcctgggggacctttgtattaagccaattaaaaacatgaattt

SEQ ID NO: 8 - DNA, 1730 bp, Homo sapiens
gtggtgagggtgactggggactaggcactaggcctttggtgcaggcgcctgaggacktggttgcactctcccttctggggatatgcccttgagcccaggcagaggagagcacagcccagggcaggacctggcagccctggtacagagcccagagggggcatcagttcctgctggtcctgctctgtttacagacaasctgctgtcctccctgcaaaggggagtgggtggggcagagggcaaktgccaggggggcacaaggctgggcatgtggctggcatgagacggtgtctgagtaatgtcaggcacctggaggcattgaccccaggaccttggaccccagacctctgaccgtggggcagccagcgtccaggtaccccaacccctgccctgggtccggcgtccccccattagtgagtcttggctctacttatagcatctgacaccagaggggccgaaaatagcccctggagaagggggaggagggggctatttaaagggcctgggaggggagagagaatgaggagtgatcatggctacctcagagctgagctgcgaggtgtcggaggagaactgtgagcgccgggaggccttctgggcagaatggaaggatctgacactgtccacacggcccgaggaggggtgagtgtgggtctgctagagtccctgcctctgctcccccagagcaccctcactgagccatgaggccagagcatgaagccctggagaaatttctgggggtgggggcaggaagaatgccccatggggagagcaaaggggaaccacccttcctgcccccaggtcccagcagcccaggggagccccccacccagcctgtgcccagagagcaacagctcccaggagctcactgcccctcccctctccccagctgctccctgcatgaggaggacacccagagacatgagacctaccaccagcaggggcagtgccaggtgctggtgcagcgctcgccctggctgatgatgcggatgggcatcctcggccgtgggctgcaggagtaccagctgccctaccagcgggtactgccgctgcccatcttcacccctgccaagatgggcgccaccaaggaggagcgtgaggacacccccatccagcttcaggagctgctggcgctggagacagccctgggtggccagtgtgtggaccgccaggaggtggctgagatcacaaagcagctgccccctgtggtgcctgtcagcaagcccggtgcmcttcgtcgctccctgtcccgctccatgtcccaggaagcacagagaggctgagagggactgtgacttgggctccgctgtgcccgccccctgggctgggcccttcctggctaggacctgtggaggggcagctcgctggcccatggctgctttgtagtttgcccagagttgggggctaggggaggggggagccagaggccaggatgcctgagccccctgagttcccaaagggagggtggcagagacagtgggcactaagggtggagagttgggggccagcacagctgaggaccctcagccccaggagaagggacaaaaggtactggtgagggcaagaggtgcctgggaggagtggccctgatccaggaaaatgtgaggggaatctggaacgctctaggcagaagaagctgggagggagggggaggtgaaaagggcagaggcaaggatggtggggcccccagcaccctctgttagtgccgcaataaatgctcaatcatgtgccag

SEQ ID NO: 9 - DNA, 3799 bp, Homo sapiens
ctggcactgggtggtaaccagcaagccagctggcatccgcatccagggtttgtttcaatgatgtctcgtggagaatatggaggggctggtgccaggactgtccttggctttgcctcggggtgtgaacggggtcagtgacctctaaaactaacctgcctctcagttctgaatccagacagaatcaatcctcagctgtgtctcgctccacaccccctgccctggaagccagggaaggttggaggtgctagggggtcaggctcccctctgtgacccctgcagctgttgtggtgactcatgtcccaacctagctgcctctcccaaggagactttcccctgggacaagggggagggaatggcatggaggaggcccacatcaagcggggccaggaacccacggtggcaggagctgggctggtgacctacccagggcagaagggcccgggactcatccagaggggaaggaaggggtcttcaggaagaccacggagatgccacaggcagaattggcttcccatctgggagataggtggggagaccctggcattttgacagccagaacctggggtgctgagcagaatcttcatgcctggcctggccgccttcggagggaagctggagggttgggtgcgagaggagtggggtcagagcccctacatccgcaggaccccaaatcggctgggccccaaggcccggactgcgctccccggtggccccggcggccctccgcgaatgcgtcctgcccctcccctgcccaagccctctgccctcacccgggtccggcgccgcccccgaagtggcgggaacaacccgaacccgaaccttctgtcctcgggagcccccagataagcggctgggaacccgcggggcccgcaggggaggcccggctgttccgcccgctaagtgcattagcacagctcacctcccctatcgcgcctgccatcggacgggcagtgccgcgccctgctctggggcccccggagcgaccacagcggaggccggaacggactgtcctttctggggcggggtggggagggggtgtcgctggagggcccggtggcatagcaacggacgagagaggcctggaggaggggcggggagggggagttgtgtggcagttctaagggaagggtgggtgctgggacgggtgtccgggagggaggggagcctggcggggtctggggcctcgtcgcggagggcgctgcgagggggaaactggggaaagggcctaattccccagtctccacctcgaatcaggaaagagaaggggcgggctgctgggcaaaagaggtgaatggctgcggggggctggagaagagagatgggaggggccggccggcgggggtgagggggtctaaagattgtgggggtgaggaactgagggtggggggcgcccagaggcgggactcggggcggggcaggcgaggcggagggcgagggctgcgggagcaagtacggagccgggggtgtgggggacgattgccgctgcagccgccgccccactcacctccggtgtgtctgcagcccggacactaagggagatggatgaatgggtggggaggatgcggcgcacatggccccgggcggctcggcggtcagctgccgcccccacagcggaccggtcggggcgggggtcgggcggtagaaaaaagggccgcgaggcgagcggggcactgggcggaccgcggcggcagcatgagcggcgcagaccgtagccccaatgcgggcgcagcccctgactcggccccgggccaggcggcggtggcttcggcctaccagcgcttcgagccgcgcgcctacctccgcaacaactacgcgccccctcgcggggacctgtgcaacccgaacggcgtcgggccgtggaagctgcgctgcttggcgcagaccttcgccaccggtgagcgggggaaactgaggcacgagggacaagaggtcgtcggggagtgaaagcaggcgcagggaaataaaaagaaggaaagggagacagaccaggcgcctaacagatggggaccaagaaacaagagatagctgagaggtgcaaacagaagagaaaaaggagcaacatcccttaggagaggggcagaggagagagaggtggagagagggggcggagagtgctcagaattgagagctaaggtgggggatgcaggacagactgaggtggagatgcataggaggaaatggaggcagatgtgggacaggggtgagaaactccaggatttcctcgctgagcctggctggtaggtatagttgttttctttctttttctttattttattttcatttatttacttatttttattttttatttgttttgagacggagtttcgctcttgttgcccaggctggagtacaatggcgccatctcggctcactgcaacctccgcctccccgggttcaagcgattctcttgcctcagcttccctagtagctgggattacaggcatgcgcccccatgcctggctaatttatttgtatttttagtagagacgggacttctccatgttggtcaggctggtctcgaactcccaaccttaggatccacccaccccggcctcccaaagtgctgggattacaggtgtgagccactgcgcccggccagtaggtatagtcttctagatgtgaaacctgagtctcagagcggtgaagttcccttccgaagggcagcccatgttggagctgggttcagtctaactctggggccaatgctttttccagatggagacacatttgcagaggagaaggaagaactagagagaggcagggagatgcaggggagggaagggtaaggaggcaggggctgcctgggctggctggcaccaggaccctcttcctctgccctgcccaggtgaagtgtccggacgcaccctcatcgacattggttcaggccccaccgtgtaccagctgctcagtgcctgcagccactttgaggacatcaccatgacagatttcctggaggtcaaccgccaggagctggggcgctggctgcaggaggagccgggggccttcaactggagcatgtacagccaacatgcctgcctcattgagggcaaggggtaaggactggggggtgagggttggggaggaggcttcccatagagtggctggttggggcaacagaggcctgagcgtagaacagccttgagccctgccttgtgcctcctgcacagggaatgctggcaggataaggagcgccagctgcgagccagggtgaaacgggtcctgcccatcgacgtgcaccagccccagcccctgggtgctgggagcccagctcccctgcctgctgacgccctggtctctgccttctgcttggaggctgtgagcccagatcttgccagctttcagcgggccctggaccacatcaccacgctgctgaggcctggggggcacctcctcctcatcggggccctggaggagtcgtggtacctggctggggaggccaggctgacggtggtgccagtgtctgaggaggaggtgagggaggccctggtgcgtagtggctacaaggtccgggacctccgcacctatatcatgcctgcccaccttcagacaggcgtagatgatgtcaagggcgtcttcttcgcctgggctcagaaggttgggctgtgagggctgtacctggtgccctgtggcccccacccacctggattccctgttctttgaagtggcacctaataaagaaataataccctgccgctgcggtcagtgctgtgtgtggctctcctgggaagcagcaagggcccagagatctgagtgtccgggtaggggagacattcaccctaggctttttttccagaagctt

SEQ ID NO: 10 - DNA, 4530 bp, Homo sapiens
aattctcgagctcgtcgaccggtcgacgagctcgagggtcgacgagctcgagggcgcgcgcccggcccccacccctcgcagcaccccgcgccccgcgccctcccagccgggtccagccggagccatggggccggagccgcagtgagcaccatggagctggcggccttgtgccgctgggggctcctcctcgccctcttgccccccggagccgcgagcacccaagtgtgcaccggcacagacatgaagctgcggctccctgccagtcccgagacccacctggacatgctccgccacctctaccagggctgccaggtggtgcagggaaacctggaactcacctacctgcccaccaatgccagcctgtccttcctgcaggatatccaggaggtgcagggctacgtgctcatcgctcacaaccaagtgaggcaggtcccactgcagaggctgcggattgtgcgaggcacccagctctttgaggacaactatgccctggccgtgctagacaatggagacccgctgaacaataccacccctgtcacaggggcctccccaggaggcctgcgggagctgcagcttcgaagcctcacagagatcttgaaaggaggggtcttgatccagcggaacccccagctctgctaccaggacacgattttgtggaaggacatcttccacaagaacaaccagctggctctcacactgatagacaccaaccgctctcgggcctgccacccctgttctccgatgtgtaagggctcccgctgctggggagagagttctgaggattgtcagagcctgacgcgcactgtctgtgccggtggctgtgcccgctgcaaggggccactgcccactgactgctgccatgagcagtgtgctgccggctgcacgggccccaagcactctgactgcctggcctgcctccacttcaaccacagtggcatctgtgagctgcactgcccagccctggtcacctacaacacagacacgtttgagtccatgcccaatcccgagggccggtatacattcggcgccagctgtgtgactgcctgtccctacaactacctttctacggacgtgggatcctgcaccctcgtctgccccctgcacaaccaagaggtgacagcagaggatggaacacagcggtgtgagaagtgcagcaagccctgtgcccgagtgtgctatggtctgggcatggagcacttgcgagaggtgagggcagttaccagtgccaatatccaggagtttgctggctgcaagaagatctttgggagcctggcatttctgccggagagctttgatggggacccagcctccaacactgccccgctccagccagagcagctccaagtgtttgagactctggaagagatcacaggttacctatacatctcagcatggccggacagcctgcctgacctcagcgtcttccagaacctgcaagtaatccggggacgaattctgcacaatggcgcctactcgctgaccctgcaagggctgggcatcagctggctggggctgcgctcactgagggaactgggcagtggactggccctcatccaccataacacccacctctgcttcgtgcacacggtgccctgggaccagctctttcggaacccgcaccaagctctgctccacactgccaaccggccagaggacgagtgtgtgggcgagggcctggcctgccaccagctgtgcgcccgagggcactgctggggtccagggcccacccagtgtgtcaactgcagccagttccttcggggccaggagtgcgtggaggaatgccgagtactgcaggggctccccagggagtatgtgaatgccaggcactgtttgccgtgccaccctgagtgtcagccccagaatggctcagtgacctgttttggaccggaggctgaccagtgtgtggcctgtgcccactataaggaccctcccttctgcgtggcccgctgccccagcggtgtgaaacctgacctctcctacatgcccatctggaagtttccagatgaggagggcgcatgccagccttgccccatcaactgcacccactcctgtgtggacctggatgacaagggctgccccgccgagcagagagccagccctctgacgtccatcgtctctgcggtggttggcattctgctggtcgtggtcttgggggtggtctttgggatcctcatcaagcgacggcagcagaagatccggaagtacacgatgcggagactgctgcaggaaacggagctggtggagccgctgacacctagcggagcgatgcccaaccaggcgcagatgcggatcctgaaagagacggagctgaggaaggtgaaggtgcttggatctggcgcttttggcacagtctacaagggcatctggatccctgatggggagaatgtgaaaattccagtggccatcaaagtgttgagggaaaacacatcccccaaagccaacaaagaaatcttagacgaagcatacgtgatggctggtgtgggctccccatatgtctcccgccttctgggcatctgcctgacatccacggtgcagctggtgacacagcttatgccctatggctgcctcttagaccatgtccgggaaaaccgcggacgcctgggctcccaggacctgctgaactggtgtatgcagattgccaaggggatgagctacctggaggatgtgcggctcgtacacagggacttggccgctcggaacgtgctggtcaagagtcccaaccatgtcaaaattacagacttcgggctggctcggctgctggacattgacgagacagagtaccatgcagatgggggcaaggtgcccatcaagtggatggcgctggagtccattctccgccggcggttcacccaccagagtgatgtgtggagttatggtgtgactgtgtgggagctgatgacttttggggccaaaccttacgatgggatcccagcccgggagatccctgacctgctggaaaagggggagcggctgccccagccccccatctgcaccattgatgtctacatgatcatggtcaaatgttggatgattgactctgaatgtcggccaagattccgggagttggtgtctgaattctcccgcatggccagggacccccagcgctttgtggtcatccagaatgaggacttgggcccagccagtcccttggacagcaccttctaccgctcactgctggaggacgatgacatgggggacctggtggatgctgaggagtatctggtaccccagcagggcttcttctgtccagaccctgccccgggcgctgggggcatggtccaccacaggcaccgcagctcatctaccaggagtggcggtggggacctgacactagggctggagccctctgaagaggaggcccccaggtctccactggcaccctccgaaggggctggctccgatgtatttgatggtgacctgggaatgggggcagccaaggggctgcaaagcctccccacacatgaccccagccctctacagcggtacagtgaggaccccacagtacccctgccctctgagactgatggctacgttgcccccctgacctgcagcccccagcctgaatatgtgaaccagccagatgttcggccccagcccccttcgccccgagagggccctctgcctgctgcccgacctgctggtgccactctggaaagggccaagactctctccccagggaagaatggggtcgtcaaagacgtttttgcctttgggggtgccgtggagaaccccgagtacttgacaccccagggaggagctgcccctcagccccaccctcctcctgccttcagcccagccttcgacaacctctattactgggaccaggacccaccagagcggggggctccacccagcaccttcaaagggacacctacggcagagaacccagagtacctgggtctggacgtgccagtgtgaaccagaaggccaagtccgcagaagccctgatgtgtcctcagggagcagggaaggcctgacttctgctggcatcaagaggtgggagggccctccgaccacttccaggggaacctgccatgccaggaacctgtcctaaggaaccttccttcctgcttgagttcccagatggctggaaggggtccagcctcgttggaagaggaacagcactggggagtctttgtggattctgaggccctgcccaatgagactctagggtccagtggatgccacagcccagcttggccctttccttccagatcctgggtactgaaagccttagggaagctggcctgagaggggaagcggccctaagggagtgtctaagaacaaaagcgacccattcagagactgtccctgaaacctagtactgccccccatgaggaaggaacagcaatggtgtcagtatccaggctttgtacagagtgcttttctgtttagtttttactttttttgttttgtttttttaaagacgaaataaagacccaggggagaatgggtgttgtatggggaggcaagtgtggggggtccttctccacacccactttgtccatttgcaaatatattttggaaaac

SEQ ID NO: 11 - DNA, 2205 bp, Homo sapiens
cacagggctcccccccgcctctgacttctctgtccgaagtcgggacaccctcctaccacctgtagagaagcgggagtggatctgaaataaaatccaggaatctgggggttcctagacggagccagacttcggaacgggtgtcctgctactcctgctggggctcctccaggacaagggcacacaactggttccgttaagcccctctctcgctcagacgccatggagctggatctgtctccacctcatcttagcagctctccggaagacctttggccagcccctgggacccctcctgggactccccggccccctgatacccctctgcctgaggaggtaaagaggtcccagcctctcctcatcccaaccaccggcaggaaacttcgagaggaggagaggcgtgccacctccctcccctctatccccaaccccttccctgagctctgcagtcctccctcacagagcccaattctcgggggcccctccagtgcaagggggctgctcccccgcgatgccagccgcccccatgtagtaaaggtgtacagtgaggatggggcctgcaggtctgtggaggtggcagcaggtgccacagctcgccacgtgtgtgaaatgctggtgcagcgagctcacgccttgagcgacgagacctgggggctggtggagtgccacccccacctagcactggagcggggtttggaggaccacgagtccgtggtggaagtgcaggctgcctggcccgtgggcggagatagccgcttcgtcttccggaaaaacttcgccaagtacgaactgttcaagagctccccacactccctgttcccagaaaaaatggtctccagctgtctcgatgcacacactggtatatcccatgaagacctcatccagaacttcctgaatgctggcagctttcctgagatccagggctttctgcagctgcggggttcaggacggaagctttggaaacgctttttctgtttcttgcgccgatctggcctctattactccaccaagggcacctctaaggatccgaggcacctgcagtacgtggcagatgtgaacgagtccaacgtgtacgtggtgacgcagggccgcaagctctacgggatgcccactgacttcggtttctgtgtcaagcccaacaagcttcgaaatggacacaaggggcttcggatcttctgcagtgaagatgagcagagccgcacctgctggctggctgccttccgcctcttcaagtacggggtgcagctgtacaagaattaccagcaggcacagtctcgccatctgcatccatcttgtttgggctccccacccttgagaagtgcctcagataataccctggtggccatggacttctctggccatgctgggcgtgtcattgagaacccccgggaggctctgagtgtggccctggaggaggcccaggcctggaggaagaagacaaaccaccgcctcagcctgcccatgccagcctccggcacgagcctcagtgcagccatccaccgcacccaactctggttccacgggcgcatttcccgtgaggagagccagcggcttattggacagcagggcttggtagacggcctgttcctggtccgggagagtcagcggaacccccagggctttgtcctctctttgtgccacctgcagaaagtgaagcattatctcatcctgccgagcgaggaggagggtcgcctgtacttcagcatggatgatggccagacccgcttcactgacctgctgcagctcgtggagttccaccagctgaaccgcggcatcctgccgtgcttgctgcgccattgctgcacgcgggtggccctctgaccaggccgtggactggctcatgcctcagcccgccttcaggctgcccgccgcccctccacccatccagtggactctggggcgcggccacaggggacgggatgaggagcgggagggttccgccactccagttttctcctctgcttctttgcctccctcagatagaaaacagcccccactccagtccactcctgacccctctcctcaagggaaggccttgggtggccccctctccttctcctagctctggaggtgctgctctagggcagggaattatgggagaagtgggggcagcccaggcggtttcacgccccacactttgtacagaccgagaggccagttgatctgctctgttttatactagtgacaataaagattattttttgatac

SEQ ID NO: 12 - DNA, 2177 bp, Homo sapiens
gaattcgcggccgctggtttgcagctgctccgtcatcgtgcggcccgacgctatctcgcgctcgtgtgcaggcccggctcggctcctggtccccggtgcgagggttaacgcgaggccccggcctcggtccccggactaggccgtgaccccgggtgccatgaagcaggagggctcggcgcggcgccgcggcgcggacaaggcgaaaccgccgcccggcggaggagaacaagaacccccaccgccgccggccccccaggatgtggagatgaaagaggaggcagcgacgggtggcgggtcaacgggggaggcagacggcaagacggcggcggcagcggttgagcactcccagcgagagctggacacagtcaccttggaggacatcaaggagcacgtgaaacagctagagaaagcggtttcaggcaaggagccgagattcgtgctgcgggccctgcggatgctgccttccacatcacgccgcctcaaccactatgttctgtataaggctgtgcagggcttcttcacttcaaataatgccactcgagactttttgctccccttcctggaagagcccatggacacagaggctgatttacagttccgtccccgcacgggaaaagctgcgtcgacacccctcctgcctgaagtggaagcctatctccaactcctcgtggtcatcttcatgatgaacagcaagcgctacaaagaggcacagaagatctctgatgatctgatgcagaagatcagtactcagaaccgccgggccctagaccttgtagccgcaaagtgttactattatcacgcccgggtctatgagttcctggacaagctggatgtggtgcgcagcttcttgcatgctcggctccggacagctacgcttcggcatgacgcagacgggcaggccaccctgttgaacctcctgctgcggaattacctacactacagcttgtacgaccaggctgagaagctggtgtccaagtctgtgttcccagagcaggccaacaacaatgagtgggccaggtacctctactacacagggcgaatcaaagccatccagctggagtactcagaggcccggagaacgatgaccaacgcccttcgcaaggcccctcagcacacagctgtcggcttcaaacagacggtgcacaagcttctcatcgtggtggagctgttgctgggggagatccctgaccggctgcagttccgccagccctccctcaagcgctcactcatgccctatttccttctgactcaagctgtcaggacaggaaacctagccaagttcaaccaggtcctggatcagtttggggagaagtttcaagcagatgggacctacaccctaattatccggctgcggcacaacgtgattaagacaggtgtacgcatgatcagcctctcctattcccgaatctccttggctgacatcgcccagaagctgcagttggatagccccgaagatgcagagttcattgttgccaaggccatccgggatggtgtcattgaggccagcatcaaccacgagaagggctatgtccaatccaaggagatgattgacatctattccacccgagagccccagctagccttccaccagcgcatctccttctgcctagatatccacaacatgtctgtcaaggccatgaggtttcctcccaaatcgtacaacaaggacttggagtctgcagaggaacggcgtgagcgagaacagcaggacttggagtttgccaaggagatggcagaagatgatgatgacagcttcccttgagctggggggctggggaggggtagggggaatggggacaggctctttcccccttgggggtcccctgcccagggcactgtccccattttcccacacacagctcatatgctgcattcgtgcagggggtgggggtgctgggagccagccaccctgacctcccccagggctcctccccagccggtgacttactgtacagcaggcaggagggtgggcaggcaacctccccgggcagggtcctggccagcagtgtgggagcaggaggggaaggatagttctgtgtactcctttagggagtgggggactagaactgggatgtcttggcttgtatgttttttgaagcttcgattatgatttttaaacaataaaaagttctcccaaaaaaaaaaaaaaaaaaaaaaaaaaaagcggccgcgaattc

SEQ ID NO: 13 - DNA, 2960 bp, Homo sapiens
ctgccgcttccaggcgtctatcagcggctcagcctttgttcagctgttctgttcaaacactctggggccattcaggcctgggtggggcagcgggaggaagggagtttgaggggggcaaggcgacgtcaaaggaggatcagagattccacaatttcacaaaactttcgcaaacagctttttgttccaacccccctgcattgtcttggacaccaaatttgcataaatcctgggaagttattactaagccttagtcgtggccccaggtaatttcctcccaggcctccatggggttatgtataaagggccccctagagctgggccccaaaacagcccggagcctgcagcccagccccacccagacccatggctggacctgccacccagagccccatgaagctgatgggtgagtgtcttggcccaggatgggagagccgcctgccctggcatgggagggaggctggtgtgacagaggggctggggatccccgttctgggaatggggattaaaggcacccagtgtccccgagagggcctcaggtggtagggaacagcatgtctcctgagcccgctctgtccccagccctgcagctgctgctgtggcacagtgcactctggacagtgcaggaagccacccccctgggccctgccagctccctgccccagagcttcctgctcaagtgcttagagcaagtgaggaagatccagggcgatggcgcagcgctccaggagaagctggtgagtgaggtgggtgagagggctgtggagggaagcccggtggggagagctaagggggatggaactgcagggccaacatcctctggaagggacatgggagaatattaggagcagtggagctggggaaggctgggaagggacttggggaggaggaccttggtggggacagtgctcgggagggctggctgggatgggagtggaggcatcacattcaggagaaagggcaagggcccctgtgagatcagagagtgggggtgcagggcagagaggaactgaacagcctggcaggacatggagggaggggaaagaccagagagtcggggaggacccgggaaggagcggcgacccggccacggcgagtctcactcagcatccttccatccccagtgtgccacctacaagctgtgccaccccgaggagctggtgctgctcggacactctctgggcatcccctgggctcccctgagcagctgccccagccaggccctgcagctggtgagtgtcaggaaaggataaggctaatgaggagggggaaggagaggaggaacacccatgggctcccccatgtctccaggttccaagctgggggcctgacgtatctcaggcagcaccccctaactcttccgctctgtctcacaggcaggctgcttgagccaactccatagcggccttttcctctaccaggggctcctgcaggccctggaagggatctcccccgagttgggtcccaccttggacacactgcagctggacgtcgccgactttgccaccaccatctggcagcaggtgagccttgttgggcagggtggccaaggtcgtgctggcattctgggcaccacagccgggcctgtgtatgggccctgtccatgctgtcagcccccagcatttcctcatttgtaataacgcccactcagaagggcccaaccactgatcacagctttcccccacagatggaagaactgggaatggcccctgccctgcagcccacccagggtgccatgccggccttcgcctctgctttccagcgccgggcaggaggggtcctggttgcctcccatctgcagagcttcctggaggtgtcgtaccgcgttctacgccaccttgcccagccctgagccaagccctccccatcccatgtatttatctctatttaatatttatgtctatttaagcctcatatttaaagacagggaagagcagaacggagccccaggcctctgtgtccttccctgcatttctgagtttcattctcctgcctgtagcagtgagaaaaagctcctgtcctcccatcccctggactgggaggtagataggtaaataccaagtatttattactatgactgctccccagccctggctctgcaatgggcactgggatgagccgctgtgagcccctggtcctgagggtccccacctgggacccttgagagtatcaggtctcccacgtgggagacaagaaatccctgtttaatatttaaacagcagtgttccccatctgggtccttgcacccctcactctggcctcagccgactgcacagcggcccctgcatccccttggctgtgaggcccctggacaagcagaggtggccagagctgggaggcatggccctggggtcccacgaatttgctggggaatctcgtttttcttcttaagacttttgggacatggtttgactcccgaacatcaccgacgtgtctcctgtttttctgggtggcctcgggacacctgccctgcccccacgagggtcaggactgtgactctttttagggccaggcaggtgcctggacatttgccttgctggatggggactggggatgtgggagggagcagacaggaggaatcatgtcaggcctgtgtgtgaaaggaagctccactgtcaccctccacctcttcaccccccactcaccagtgtcccctccactgtcacattgtaactgaacttcaggataataaagtgtttgcctccagtcacgtccttcctccttcttgagtccagctggtgcctggccaggggctggggaggtggctgaagggtgggagaggccagagggaggtcggggaggaggtctggggaggaggtccagggaggaggaggaaagttctcaagttcgtctgacattcattccgttagcacatatttatctgagcacctactctgtgcagacgctgggctaagtgctggggacacagcagggaacaaggcagacatggaatctgcactcga

SEQ ID NO: 14 - DNA, 850 bp, Homo sapiens
  misc_feature (3)..(4): n=a, c, g or t
  misc_feature (9)..(9): n=a, c, g or t
  misc_feature (11)..(11): n=a, c, g or t
  misc_feature (18)..(18): n=a, c, g or t
  misc_feature (202)..(202): n=a, c, g or t
  misc_feature (205)..(205): n=a, c, g or t
  misc_feature (273)..(273): n=a, c, g or t
  misc_feature (327)..(327): n=a, c, g or t
  misc_feature (367)..(367): n=a, c, g or t
  misc_feature (581)..(581): n=a, c, g or t
  misc_feature (599)..(599): n=a, c, g or t
  misc_feature (628)..(628): n=a, c, g or t
  misc_feature (673)..(673): n=a, c, g or t
  misc_feature (675)..(675): n=a, c, g or t
  misc_feature (682)..(682): n=a, c, g or t
  misc_feature (693)..(693): n=a, c, g or t
  misc_feature (698)..(698): n=a, c, g or t
  misc_feature (700)..(700): n=a, c, g or t
  misc_feature (720)..(720): n=a, c, g or t
  misc_feature (730)..(730): n=a, c, g or t
  misc_feature (734)..(734): n=a, c, g or t
  misc_feature (742)..(743): n=a, c, g or t
  misc_feature (746)..(746): n=a, c, g or t
  misc_feature (748)..(748): n=a, c, g or t
  misc_feature (752)..(752): n=a, c, g or t
  misc_feature (762)..(762): n=a, c, g or t
  misc_feature (767)..(767): n=a, c, g or t
  misc_feature (777)..(777): n=a, c, g or t
  misc_feature (783)..(784): n=a, c, g or t
  misc_feature (789)..(789): n=a, c, g or t
  misc_feature (794)..(794): n=a, c, g or t
  misc_feature (797)..(798): n=a, c, g or t
  misc_feature (803)..(805): n=a, c, g or t
  misc_feature (810)..(810): n=a, c, g or t
  misc_feature (817)..(817): n=a, c, g or t
  misc_feature (826)..(827): n=a, c, g or t
  misc_feature (831)..(832): n=a, c, g or t
  misc_feature (834)..(834): n=a, c, g or t
  misc_feature (837)..(838): n=a, c, g or t
  misc_feature (840)..(840): n=a, c, g or t
  misc_feature (844)..(844): n=a, c, g or t
  misc_feature (846)..(848): n=a, c, g or t
ttnnctttntngccatgnccagttcaactcagcctctcagttccacacggacaacatgcgggaccctctgaaccgagtcctggccaacctgttcctgctcatctcctccatcctggggtctcgcaccgctggcccccacacccagttcgtgcagtggttcatggaggagtgtgtggactgcctggagcagggtggccgtggnagngtcctgcagttcatgcccttcaccaccgtgtcggaactggtgaaggtgtcagccatgtctagccccanggtggttctggccatcacggacctcagcctgcccctgggccgccaggtggctgntaaagccattgctgcactctgaggggcttggcatggccgnagtgggggctggggactggcgcagccccaggcgcctccaagggaagcagtgaggaaagatgaggcatcgtgcctcacatccgttccacatggtgcaagagcctctagcggcttccagttccccgctcctgactcctgactccaggatgtctcccggtttcttcttttcaaaattttcctctccatcttgctggcaactgaggagagtgagcagnctggaccacaagcccagngggtcacccctgtgttgcgcccgcccagnccaggagtagtcttacctcttgaggaactttcttggatggaaagngngtttttntgtgttgtgtntgtgnangtgtttttcggggttttttngggcaatatnttangggaatcnnccntncgcncattttttcnttagagctccccggnggaaanntcttnatccnctnnctttnnnctccntcacctnccttctttnntctnntnttnncntccncnnncc

SEQ ID NO: 15 - DNA, 2309 bp, Homo sapiens
ccccgggcgcaggaggcgggcggcccggccccaccggccccccatggacgcccccagcacggggcgctgagacccccgcgtcgctgcccagcccggtccggcgcgccacgccagggatctctggacaggacaagactccgaagctactcccccagcacacagcccgggacccacaaacccagcttgcccccagccctcccacctgccactccctggcccctcccaccgcccgccccccttggggcgcagggcatggtgtgaaaggccaagtgctgaggcgggtatcatgggtgctgtgccctagggcctgggtggcagggggtgggtggcctgtgggtgtgccgggggggccagtgtgcccaccccagtctcttggcgtgctggagggcatcctggatggaattgaagtgaatggaacagaagccaagcaaggtggagtgtgggtcagacccagaggagaacagtgccaggtcaccagatggaaagcgaaaaagaaagaacggccaatgttccctgaaaaccagcatgtcagggtatatccctagttacctggacaaagacgagcagtgtgtcgtgtgtggggacaaggcaactggttatcactaccgctgtatcacttgtgagggctgcaagggcttctttcgccgcacaatccagaagaacctccatcccacctattcctgcaaatatgacagctgctgtgtcattgacaagatcacccgcaatcagtgccagctgtgccgcttcaagaagtgcatcgccgtgggcatggccatggacttggttctagatgactcgaagcgggtggccaagcgtaagctgattgagcagaaccgggagcggcggcggaaggaggagatgatccgatcactgcagcagcgaccagagcccactcctgaagagtgggatctgatccacattgccacagaggcccatcgcagcaccaatgcccagggcagccattggaaacagaggcggaaattcctgcccgatgacattggccagtcacccattgtctccatgccggacggagacaaggtggacctggaagccttcagcgagtttaccaagatcatcaccccggccatcacccgtgtggtggactttgccaaaaaactgcccatgttctccgagctgccttgcgaagaccagatcatcctcctgaaggggtgctgcatggagatcatgtccctgcgggcggctgtccgctacgaccctgagagcgacaccctgacgctgagtggggagatggctgtcaagcgggagcagctcaagaatggcggcctgggcgtagtctccgacgccatctttgaactgggcaagtcactctctgcctttaacctggatgacacggaagtggctctgctgcaggctgtgctgctaatgtcaacagaccgctcgggcctgctgtgtgtggacaagatcgagaagagtcaggaggcgtacctgctggcgttcgagcactacgtcaaccaccgcaaacacaacattccgcacttctggcccaagctgctgatgaaggagagagaagtgcagagttcgattctgtacaagggggcagcggcagaaggccggccgggcgggtcactgggcgtccacccggaaggacagcagcttctcggaatgcatgttgttcagggtccgcaggtccggcagcttgagcagcagcttggtgaagcgggaagtctccaagggccggttcttcagcaccagagcccgaagagcccgcagcagcgtctcctggagctgctccaccgaagcggaattctccatgcccgagcggtctgtggggaagacgacagcagtgaggcggactccccgagctcctctgaggaggaaccggaggtctgcgaggacctggcaggcaatgcagcctctccctgaagccccccagaaggccgatggggaaggagaaggagtgccataccttctcccaggcctctgccccaagagcaggaggtgcctgaaagctgggagcgtgggctcagcagggctggtcacctcccatcccgtaagaccaccttcccttcctcagcaggccaaacatggccagactcccttgctttttgctgtgtagttccctctgcctgggatgcccttccccctttctctgcctggcaacatcttacttgtcctttgaggccccaactcaagtgtcacctccttccccagctcccccaggcagaaatagttgtctgtgcttccttggttcatgcttctactgtgacacttatctcactgttttataattagtcgggcatgagtctgtttcccaagctagactgtgtctgaatcatgtctgtatcccg

SEQ ID NO: 16 - DNA, 2355 bp, Homo sapiens
ccgttgcctcaacgtccaacccttctgcagggctgcagtccggccaccccaagaccttgctgcagggtgcttcggatcctgatcgtgagtcgcggggtccactccccgcccttagccagtgcccagggggcaacagcggcgatcgcaacctctagtttgagtcaaggtccagtttgaatgaccgctctcagctggtgaagacatgaccaccctggactccaacaacaacacaggtggcgtcatcacctacattggctccagtggctcctccccaagccgcaccagccctgaatccctctatagtgacaactccaatggcagcttccagtccctgacccaaggctgtcccacctacttcccaccatcccccactggctccctcacccaagacccggctcgctcctttgggagcattccacccagcctgagtgatgacggctccccttcttcctcatcttcctcgtcgtcatcctcctcctccttctataatgggagcccccctgggagtctacaagtggccatggaggacagcagccgagtgtcccccagcaagagcaccagcaacatcaccaagctgaatggcatggtgttactgtgtaaagtgtgtggggacgttgcctcgggcttccactacggtgtgctcgcctgcgagggctgcaagggctttttccgtcggagcatccagcagaacatccagtacaaaaggtgtctgaagaatgagaattgctccatcgtccgcatcaatcgcaaccgctgccagcaatgtcgcttcaagaagtgtctctctgtgggcatgtctcgagacgctgtgcgttttgggcgcatccccaaacgagagaagcagcggatgcttgctgagatgcagagtgccatgaacctggccaacaaccagttgagcagccagtgcccgctggagacttcacccacccagcaccccaccccaggccccatgggcccctcgccaccccctgctccggtcccctcacccctggtgggcttctcccagtttccacaacagctgacgcctcccagatccccaagccctgagcccacagtggaggatgtgatatcccaggtggcccgggcccatcgagagatcttcacctacgcccatgacaagctgggcagctcacctggcaacttcaatgccaaccatgcatcaggtagccctccagccaccaccccacatcgctgggaaaatcagggctgcccacctgcccccaatgacaacaacaccttggctgcccagcgtcataacgaggccctaaatggtctgcgccaggctccctcctcctaccctcccacctggcctcctggccctgcacaccacagctgccaccagtccaacagcaacgggcaccgtctatgccccacccacgtgtatgcagccccagaaggcaaggcacctgccaacagtccccggcagggcaactcaaagaatgttctgctggcatgtcctatgaacatgtacccgcatggacgcagtgggcgaacggtgcaggagatctgggaggatttctccatgagcttcacgcccgctgtgcgggaggtggtagagtttgccaaacacatcccgggcttccgtgacctttctcagcatgaccaagtcaccctgcttaaggctggcacctttgaggtgctgatggtgcgctttgcttcgttgttcaacgtgaaggaccagacagtgatgttcctaagccggaccacctacagcctgcaggagcttggtgccatgggcatgggagacctgctcagtgccatgttcgacttcagcgagaagctcaactccctggcgcttaccgaggaggagctgggcctcttcaccgcggtggtgcttgtctctgcagaccgctcgggcatggagaattccgcttcggtggagcagctccaggagacgctgctgcgggctcttcgggctctggtgctgaagaaccggcccttggagacttcccgcttcaccaagctgctgctcaagctgccggacctgcggaccctgaacaacatgcattccgagaagctgctgtccttccgggtggacgcccagtgacccgcccggccggccttctgccgctgcccccttgtacagaatcgaactctgcacttctctctcctttacgagacgaaaaggaaaagcaaaccagaatcttatttatattgttataaaatattccaagatgagcctctggccccctgagccttcttgtaaatacctgcctccctcccccatcaccgaacttcccctcctcccctatttaaaccactctgtctcccccacaaccctcccctggccctctgatttgttctgttcctgtctcaaatccaatagttcacagctaaaaaaaaaaaaaaaaaaag

SEQ ID NO: 17 - DNA, 4119 bp, Homo sapiens
gaattccgttgctgtcgcacacacacacacacacacacacacaccccaacacacacacacacaccccaacacacacacacacacacacacacacacacacacacacacacacacagcgggatggccgagcgccgcacgcgtagcacgccgggactagctatccagcctcccagcagcctctgcgacgggcgcggtgcgtaagtacctcgccggtggtggccgttctccgtaagatggcggaccggcggcggcagcgcgcttcgcaagacaccgaggacgaggaatctggtgcttcgggctccgacagcggcggctccccgttgcggggaggcgggagctgcagcggtagcgccggaggcggcggcagcggctctctgccttcacagcgcggaggccgaaccggggcccttcatctgcggcgggtggagagcgggggcgccaagagtgctgaggagtcggagtgtgagagtgaagatggcattgaaggtgatgctgttctctcggattatgaaagtgcagaagactcggaaggtgaagaaggtgaatacagtgaagaggaaaactccaaagtggagctgaaatcagaagctaatgatgctgttaattcttcaacaaaagaagagaagggagaagaaaagcctgacaccaaaagcactgtgactggagagaggcaaagtggggacggacaggagagcacagagcctgtggagaacaaagtgggtaaaaagggccctaagcatttggatgatgatgaagatcggaagaatccagcatacatacctcggaaagggctcttctttgagcatgatcttcgagggcaaactcaggaggaggaagtcagacccaaggggcgtcagcgaaagctatggaaggatgagggtcgctgggagcatgacaagttccgggaagatgagcaggccccaaagtcccgacaggagctcattgctctttatggttatgacattcgctcagctcataatcctgatgacatcaaacctcgaagaatccggaaaccccgatatgggagtcctccacaaagagatccaaactggaacggtgagcggctaaacaagtctcatcgccaccagggtcttgggggcaccctaccaccaaggacatttattaacaggaatgctgcaggtaccggccgtatgtctgcacccaggaattattctcgatctgggggcttcaaggaaggtcgtgctggttttaggcctgtggaagctggtgggcagcatggtggccggtctggtgagactgttaagcatgagattagttaccggtcacggcgcctagagcagacttctgtgagggatccatctccagaagcagatgctccagtgcttggcagtcctgagaaggaagaggcagcctcagagccaccagctgctgctcctgatgctgcaccaccaccccctgataggcccattgagaagaaatcctattcccgggcaagaagaactcgaaccaaagttggagatgcagtcaagcttgcagaggaggtgccccctcctcctgaaggactgattccagcacctccagtcccagaaaccaccccaactccacctactaagactgggacctgggaagctccggtggattctagtacaagtggacttgagcaagatgtggcacaactaaatatagcagaacagaattggagtccggggcagccttctttcctgcaaccacgggaacttcgaggtatgcccaaccatatacacatgggagcaggacctccacctcagtttaaccggatggaagaaatgggtgtccagggtggtcgagccaaacgctattcatcccagcggcaaagacctgtgccagagccccccgcccctccagtgcatatcagtatcatggagggacattactatgatccactgcagttccagggaccaatctatacccatggtgacagccctgccccgctgcctccacagggcatgcttgtgcagccaggaatgaaccttccccacccaggtttacatccccaccagacaccagctcctctgcccaatccaggcctctatcccccaccagtgtccatgtctccaggacagccaccacctcagcagttgcttgctcctacttacttttctgctccaggcgtcatgaactttggtaatcccagttacccttatgctccaggggcactgcctcccccaccaccgcctcatctgtatcctaatacacaggccccatcacaggtatatggaggagtgacctactataaccccgcccagcagcaggtgcagccaaagccctccccaccccggaggactccccagccagtcaccatcaagccccctccacctgaggttgtaagcaggggttccagttaatacaagtttctgaatattttaaatcttaacatcatataaaaagcagcagaggtgagaactcagaagagaaatacagctggctatctactaccagaagggcttcaaagatatagggtgtggctcctaccagcaaacagctgaaagaggaggacccctgccttcctctgaggacaggctctagagagagggagaaacaagtggacctcgtcccatcttcactcttcacttgagttggctgtgttcgggggagcagagagagccagacagccccaagcttctgagtctagatacagaagcccatgtcttctgctgttcttcacttctgggaaattgaagtgtcttctgttcccaaggaagctccttcctgtttgttttgttttctaagatgttcatttttaaagcctggcttcttatccttaatattattttaattttttctctttgtttctgtttcttgctctctctccctgcctttaaatgaaacaagtctagtcttctggttttctagcccctctggattcccttttgactcttccgtgcatcccagataatggagaatgtatcagccagccttccccaccaagtctaaaaagacctggcctttcacttttagttggcatttgttatcctcttgtatacttgtattcccttaactctaaccctgtggaagcatggctgtctgcacagagggtcccattgtgcagaaaagctcagagtaggtgggtaggagcccttctctttgacttaggtttttaggagtctgagcatccatcaatacctgtactatgatgggcttctgttctctgctgagggccaataccctactgtggggagagatggcacaccagatgcttttgtgagaaagggatggtggagtgagagcctttgcctttaggggtgtgtattcacatagtcctcagggctcagtcttttgaggtaagtggaattagagggccttgcttctcttctttccattcttcttgctacaccccttttccagttgctgtggaccaatgcatctctttaaaggcaaatattatccagcaagcagtctaccctgtcctttgcaattgctcttctccacgtctttcctgctacaagtgttttagatgttactaccttattttccccgaattctatttttgtccttgcagacagaatataaaaactcctgggcttaaggcctaaggaagccagtcaccttctgggcaagggctcctatctttcctccctatccatggcactaaaccacttctctgctgcctctgtggaagagattcctattactgcagtacatacgtctgccaggggtaacctggccactgtccctgtccttctacagaacctgagggcaaagatggtggctgtgtctctccccggtaatgtcactgtttttattccttccatctagcagctggcctaatcactctgagtcacaggtgtgggatggagagtggggagaggcacttaatctgtaacccccaaggaggaaataactaagagattcttctaggggtagctggtggttgtgccttttgtaggctgttccctttgccttaaacctgaagatgtctcctcaagcctgtgggcagcatgcccagattcccagaccttaagacactgtgagagttgtctctgttggtccactgtgtttagttgcaaggatttttccatgtgtggtggtgttttttgttactgttttaaagggtgcccatttgtgatcagcattgtgacttggagataataaaatttagactataaacttgaaaaaaaa

SEQ ID NO: 18 - DNA, 2653 bp, Homo sapiens
gagcgcggctggagtttgctgctgccgctgtgcagtttgttcaggggcttgtggcggtgagtccgagaggctgcgtgtgagagacgtgagaaggatcctgcactgaggaggtggaaagaagaggattgctcgaggaggcctggggtctgtgagacagcggagctgggtgaaggctgcgggttccggcgaggcctgagctgtgctgtcgtcatgcctcaaacccgatcccaggcacaggctacaatcagttttccaaaaaggaagctgtctcgggcattgaacaaagctaaaaactccagtgatgccaaactagaaccaacaaatgtccaaaccgtaacctgttctcctcgtgtaaaagccctgcctctcagccccaggaaacgtctgggcgatgacaacctatgcaacactccccatttacctccttgttctccaccaaagcaaggcaagaaagagaatggtccccctcactcacatacacttaagggacgaagattggtatttgacaatcagctgacaattaagtctcctagcaaaagagaactagccaaagttcaccaaaacaaaatactttcttcagttagaaaaagtcaagagatcacaacaaattctgagcagagatgtccactgaagaaagaatctgcatgtgtgagactattcaagcaagaaggcacttgctaccagcaagcaaagctggtcctgaacacagctgtcccagatcggctgcctgccagggaaagggagatggatgtcatcaggaatttcttgagggaacacatctgtgggaaaaaagctggaagcctttacctttctggtgctcctggaactggaaaaactgcctgcttaagccggattctgcaagacctcaagaaggaactgaaaggctttaaaactatcatgctgaattgcatgtccttgaggactgcccaggctgtattcccagctattgctcaggagatttgtcaggaagaggtatccaggccagctgggaaggacatgatgaggaaattggaaaaacatatgactgcagagaagggccccatgattgtgttggtattggacgagatggatcaactggacagcaaaggccaggatgtattgtacacgctatttgaatggccatggctaagcaattctcacttggtgctgattggtattgctaataccctggatctcacagatagaattctacctaggcttcaagctagagaaaaatgtaagccacagctgttgaacttcccaccttataccagaaatcagatagtcactattttgcaagatcgacttaatcaggtatctagagatcaggttctggacaatgctgcagttcaattctgtgcccgcaaagtctctgctgtttcaggagatgttcgcaaagcactggatgtttgcaggagagctattgaaattgtagagtcagatgtcaaaagccagactattctcaaaccactgtctgaatgtaaatcaccttctgagcctctgattcccaagagggttggtcttattcacatatcccaagtcatctcagaagttgatggtaacaggatgaccttgagccaagagggagcacaagattccttccctcttcagcagaagatcttggtttgctctttgatgctcttgatcaggcagttgaaaatcaaagaggtcactctggggaagttatatgaagcctacagtaaagtctgtcgcaaacagcaggtggcggctgtggaccagtcagagtgtttgtcactttcagggctcttggaagccaggggcattttaggattaaagagaaacaaggaaacccgtttgacaaaggtgtttttcaagattgaagagaaagaaatagaacatgctctgaaagataaagctttaattggaaatatcttagctactggattgccttaaattcttctcttacaccccacccgaaagtattcagctggcatttagagagctacagtcttcattttagtgctttacacattcgggcctgaaaacaaatatgaccttttttacttgaagccaatgaattttaatctatagattctttaatattagcacagaataatatctttgggtcttactatttttacccataaaagtgaccaggtagaccctttttaattacattcactacttctaccacttgtgtatctctagccaatgtgcttgcaagtgtacagatctgtgtagaggaatgtgtgtatatttacctcttcgtttgctcaaacatgagtgggtatttttttgtttgttttttttgttgttgttgtttttgaggcgcgtctcaccctgttgcccaggctggagtgcaatggcgcgttctctgctcactacagcacccgcttcccaggttgaagtgattctcttgcctcagcctcccgagtagctgggattacaggtgcccaccaccgcgcccagctaattttttaatttttagtagagacagggttttaccatgttggccaggctggtcttgaactcctgaccctcaagtgatctgcccaccttggcctccctaagtgctgggattataggcgtgagccaccatgctcagccattaaggtattttgttaagaactttaagtttagggtaagaagaatgaaaatgatccagaaaaatgcaagcaagtccacatggagatttggaggacactggttaaag

SEQ ID NO: 19 - DNA, 2907 bp, Homo sapiens
gccatctgggcccaggccccatgccccgaggaggggtggtctgaagcccaccagagccccctgccagactgtctgcctcccttctgactgtggccgcttggcatggccagcaacagcagctcctgcccgacacctgggggcgggcacctcaatgggtacccggtgcctccctacgccttcttcttcccccctatgctgggtggactctccccgccaggcgctctgaccactctccagcaccagcttccagttagtggatatagcacaccatccccagccaccattgagacccagagcagcagttctgaagagatagtgcccagccctccctcgccaccccctctaccccgcatctacaagccttgctttgtctgtcaggacaagtcctcaggctaccactatggggtcagcgcctgtgagggctgcaagggcttcttccgccgcagcatccagaagaacatggtgtacacgtgtcaccgggacaagaactgcatcatcaacaaggtgacccggaaccgctgccagtactgccgactgcagaagtgctttgaagtgggcatgtccaaggagtctgtgagaaacgaccgaaacaagaagaagaaggaggtgcccaagcccgagtgctctgagagctacacgctgacgccggaggtgggggagctcattgagaaggtgcgcaaagcgcaccaggaaaccttccctgccctctgccagctgggcaaatacactacgaacaacagctcagaacaacgtgtctctctggacattgacctctgggacaagttcagtgaactctccaccaagtgcatcattaagactgtggagttcgccaagcagctgcccggcttcaccaccctcaccatcgccgaccagatcaccctcctcaaggctgcctgcctggacatcctgatcctgcggatctgcacgcggtacacgcccgagcaggacaccatgaccttctcggacgggctgaccctgaaccggacccagatgcacaacgctggcttcggccccctcaccgacctggtctttgccttcgccaaccagctgctgcccctggagatggatgatgcggagacggggctgctcagcgccatctgcctcatctgcggagaccgccaggacctggagcagccggaccgggtggacatgctgcaggagccgctgctggaggcgctaaaggtctacgtgcggaagcggaggcccagccgcccccacatgttccccaagatgctaatgaagattactgacctgcgaagcatcagcgccaagggggctgagcgggtgatcacgctgaagatggagatcccgggctccatgccgcctctcatccaggaaatgttggagaactcagagggcctggacactctgagcggacagccggggggtggggggcgggacgggggtggcctggcccccccgccaggcagctgtagccccagcctcagccccagctccaacagaagcagcccggccacccactccccgtgaccgcccacgccacatggacacagccctcgccctccgccccggcttttctctgcctttctaccgaccatgtgaccccgcaccagccctgcccccacctgccctcccgggcagtactggggaccttccctgggggacggggagggaggaggcagcgactccttggacagaggcctgggccctcagtggactgcctgctcccacagcctgggctgacgtcagaggccgaggccaggaactgagtgaggcccctggtcctgggtctcaggatgggtcctgggggcctcgtgttcatcaagacacccctctgcccagctcaccacatcttcatcaccagcaaacgccaggacttggctcccccatcctcagaactcacaagccattgctccccagctggggaacctcaacctcccccctgcctcggttggtgacagagggggtgggacaggggcggggggttccccctgtacataccctgccataccaaccccaggtattaattctcgctggttttgtttttattttaatttttttgttttgatttttttaataagaattttcattttaagcacatttatactgaaggaatttgtgctgtgtattggggggagctggatccagagctggagggggtgggtccgggggagggagtggctcggaaggggcccccactctcctttcatgtccctgtgccccccagttctcctcctcagccttttcctcctcagttttctctttaaaactgtgaagtactaactttccaaggcctgccttcccctccctcccactggagaagccgccagcccctttctccctctgcctgaccactgggtgtggacggtgtggggcagccctgaaaggacaggctcctggccttggcacttgcctgcacccaccatgaggcatggagcagggcagagcaagggccccgggacagagttttcccagacctggctcctcggcagagctgcctcccgtcagggcccacatcatctaggctccccagcccccactgtgaaggggctggccaggggcccgagctgcccccacccccggcctcagccaccagcacccccatagggcccccagacaccacacacatgcgcgtgcgcacacacacaaacacacacacactggacagtagatgggccgacacacacttggcccgagttcctccatttccctggcctgccccccacccccaacctgtcccacccccgtgccccctccttaccccgcaggacgggcctacaggggggtctcccctcacccctgcacccccagctgggggagctggctctgccccgacctccttcaccaggggttggggccccttcccctggagcccgtgggtgcacctgttactgttgggctttccactgagatctactggataaagaataaagttctatttattct

SEQ ID NO: 20 - DNA, 2096 bp, Homo sapiens
  misc_feature (23)..(23): n=a, c, g or t
  misc_feature (27)..(27): n=a, c, g or t
  misc_feature (80)..(80): n=a, c, g or t
  misc_feature (120)..(120): n=a, c, g or t
agatgtttaaaaatactttgatnctcngtttccacctctcttaaattgtctttccctatgttaaatatacagtcatcacnttgctgaaaaaagttcgcaatgagaacaatcatctaaaantggctgtaactaggtcaggcgcggttgctcatgcctgtaatcccaccactttgggaggccgaggcaattggatcacctgaggtcaggattttgagaccagcttgaccaacatggtggaatcccatctctactaaaaatacaaaaaattagccgggtgtggtggcacacccctgtaatcccacctactcaggaggctgaggcaggaaaatcccttgaacccaggaggcaaaggttgcattgagccgaaataacaccactgcactccagcctggacgatagagtgagaccccatctcaaaaaaagagcagctgtgacaaatgcctgtattgaattgcaggtcagtcttccacctccactaccggtgccaaaaaaagggctgccccaaaaggaactaaaagggatccagctttgaattctggtgtctctcaaaagcctgatcctgccaaaaccaagaatcgccgcaaaaggaagccatccacttctgatgattctgactctaattttgagaaaattgtttcgaaagcagtcacaagcaaggtgagtgttgatcctagtcagtccttttgctgtagatgttctgaaacacgtaactaagccattgttcttaaaaatttggcatatctttaagaaaattaactctcatattctgttagcttttactgtacatatttagttttaacaaagttaaatatgccacttatttggccaatggaagagttggccttagatctgcttcttattacttggtagaaaatagaaaactccttgaatatagtgtcttgatacatttttttacattacaattatgttgtcagatttacaatgtgcaagttacctgggcttttctcttttagaaatccaagggggagagtgatgacttccatatggactttgactcagctgtggctcctcgggcaaaatctgtacgggcaaagaaacctataaagtacctggaagagtcagatgaagatgatctgttttaaaatgtgaggcgattattttaagtaattatcttaccaagcccaagactggttttaaagttacctgaagctcttaacttcctcccctctgaatttagtttggggaaggtgtttttagtacaagacatcaaagtgaagtaaagcccaagtgttctttagctttttataatactgtataaatagtgaccatctcatgggcattgttttcttctctgctttgtctgtgttttgagtctgcttcttttgtctttaaaacctgatttttaagttcttctgaactgtagaaatagctatctgatcacttcagcgtaaagcagtgtgtttattaaccatccactaagctaaaactagagcagtttgatttaaaagtgtcactcttcctccttttctactttcagtagatatgagatagagcataattatctgttttatcttagttttatacataatttaccatcagatagaactttatggttctagtacagatactctactacactcagcctcttatgtgccaagtttttctttaagcaatgagaaattgctcatgttcttcatcttctcaaatcatcagaggccgaagaaaaacactttggctgtgtctataacttgacacagtcaatagaatgaagaaaattagagtagttatgtgattatttcagctcttgacctgtcccctctggctgcctctgagtctgaatctcccaaagagagaaaccaatttctaagaggactggattgcagaagactcggggacaacatttgatccaagatcttaaatgttatattgataaccatgctcagcaatgagctattagattcattttgggaaatctccataatttcaatttgtaaactttgttaagacctgtctacattgttatatgtgtgtgacttgagtaatgttatcaacgtttttgtaaatatttactatgtttttctattagctaaattccaacaattttgtactttaataaaatgttctaaacattgaaa

SEQ ID NO: 21 - DNA, 2160 bp, Homo sapiens
agccccctgcccctcgccgccccccgccgcctgcctgggccgggccgaggatgcggcgcagcgcctcggcggccaggcttgctcccctccggcacgcctgctaacttcccccgctacgtccccgttcgcccgccgggccgccccgtctccccgcggcctccgggtccgggtcctccaggacggccaggccgtgccgccgtgtgccctccgccgctcgcccgcgcgccgcgcgctccccgcctgcgcccagcgccccgcgcccgcgccccagtcctcgggcggtccatgctgcccctctgcctcgtggccgccctgctgctggccgccgggcccgggccgagcctgggcgacgaagccatccactgcccgccctgctccgaggagaagctggcgcgctgccgcccccccgtgggctgcgaggagctggtgcgagaggcgggctgcggctgttgcgccacttgcgccctgggcttggggatgccctgcggggtgtacaccccccgttgcggctcgggcctgcgctgctacccgccccgaggggtggagaagcccctgcacacactgatgcacgggcaaggcgtgtgcatggagctggcggagatcgaggccatccaggaaagcctgcagccctctgacaaggacgagggtgaccaccccaacaacagcttcagcccctgtagcgcccatgaccgcaggtgcctgcagaagcacttcgccaaaattcgagaccggagcaccagtgggggcaagatgaaggtcaatggggcgccccgggaggatgcccggcctgtgccccagggctcctgccagagcgagctgcaccgggcgctggagcggctggccgcttcacagagccgcacccacgaggacctctacttcatccccatccccaactgcgaccgcaacggcaacttccaccccaagcagtgtcacccagctctggatgggcagcgtggcaagtgctggtgtgtggaccggaagacgggggtgaagcttccggggggcctggagccaaagggggagctggactgccaccagctggctgacagctttcgagagtgaggcctgccagcaggccagggactcagcgtcccctgctactcctgtgctctggaggctgcagagctgacccagagtggagtctgagtctgagtcctgtctctgcctgcggcccagaagtttccctcaaatgcgcgtgtgcacgtgtgcgtgtgcgtgcgtgtgtgtgtgtttgtgagcatgggtgtgcccttggggtaagccagagcctggggtgttctctttggtgttacacagcccaagaggactgagactggcacttagcccaagaggtctgagccctggtgtgtttccagatcgatcctggattcactcactcactcattccttcactcatccagccacctaaaaacatttactgaccatgtactacgtgccagctctagttttcagccttgggaggttttattctgacttcctctgattttggcatgtggagacactcctataaggagagttcaagcctgtgggagtagaaaaatctcattcccagagtcagaggagaagagacatgtaccttgaccatcgtccttcctctcaagctagcccagagggtgggagcctaaggaagcgtggggtagcagatggagtaatggtcacgaggtccagacccactcccaaagctcagacttgccaggctccctttctcttcttccccaggtccttcctttaggtctggttgttgcaccatctgcttggttggctggcagctgagagccctgctgtgggagagcgaagggggtcaaaggaagacttgaagcacagagggctagggaggtggggtacatttctctgagcagtcagggtgggaagaaagaatgcaagagtggactgaatgtgcctaatggagaagacccacgtgctaggggatgaggggcttcctgggtcctgttcccctaccccatttgtggtcacagccatgaagtcaccgggatgaacctatccttccagtggctcgctccctgtagctctgcctccctctccatatctccttcccctacacctccctccccacacctccctactcccctgggcatcttctggcttgactggatggaaggagacttaggaacctaccagttggccatgatgtcttttctt

SEQ ID NO: 22 - DNA, 2215 bp, Homo sapiens
ctgcagggagccatgattgcaccactgcactccagcctgggcaacagagtgagaccatgtctcaagaaaaaaaaaaaagaaagaaaccactgctctaggctaaatcccagccagagttggagccacccagctaaactggcctgttttccctcatttccttccccgaaggtatgcctgtgtcaagatgaggtcacggacgattacatcggagacaacaccacagtggactacactttgttcgagtctttgtgctccaagaaggacgtgcggaactttaaagcctggttcctccctatcatgtactccatcatttgtttcgtgggcctactgggcaatgggctggtcgtgttgacctatatctatttcaagaggctcaagaccatgaccgatacctacctgctcaacctggcggtggcagacatcctcttcctcctgacccttcccttctgggcctacagcgcggccaagtcctgggtcttcggtgtccacttttgcaagctcatctttgccatctacaagatgagcttcttcagtggcatgctcctacttctttgcatcagcattgaccgctacgtggccatcgtccaggctgtctcagctcaccgccaccgtgcccgcgtccttctcatcagcaagctgtcctgtgtgggcatctggatactagccacagtgctctccatcccagagctcctgtacagtgacctccagaggagcagcagtgagcaagcgatgcgatgctctctcatcacagagcatgtggaggcctttatcaccatccaggtggcccagatggtgatcggctttctggtccccctgctggccatgagcttctgttaccttgtcatcatccgcaccctgctccaggcacgcaactttgagcgcaacaaggccatcaaggtgatcatcgctgtggtcgtggtcttcatagtcttccagctgccctacaatggggtggtcctggcccagacggtggccaacttcaacatcaccagtagcacctgtgagctcagtaagcaactcaacatcgcctacgacgtcacctacagcctggcctgcgtccgctgctgcgtcaaccctttcttgtacgccttcatcggcgtcaagttccgcaacgatctcttcaagctcttcaaggacctgggctgcctcagccaggagcagctccggcagtggtcttcctgtcggcacatccggcgctcctccatgagtgtggaggccgagaccaccaccaccttctccccataggcgactcttctgcctggactagagggacctctcccagggtccctggggtggggatagggagcagatgcaatgactcaggacatccccccgccaaaagctgctcagggaaaagcagctctcccctcagagtgcaagccctgctccagaagttagcttcaccccaatcccagctacctcaaccaatgccgaaaaagacagggctgataagctaacaccagacagacaacactgggaaacagaggctattgtcccctaaaccaaaaactgaaagtgaaagtccagaaactgttcccacctgctggagtgaaggggccaaggagggtgagtgcaaggggcgtgggagtggcctgaagagtcctctgaatgaaccttctggcctcccacagactcaaatgctcagaccagctcttccgaaaaccaggccttatctccaagaccagagatagtggggagacttcttggcttggtgaggaaaagcggacatcagctggtcaaacaaactctctgaacccctccctccatcgttttcttcactgtcctccaagccagcgggaatggcagctgccacgccgccctaaaagcacactcatcccctcacttgccgcgtcgccctcccaggctctcaacaggggagagtgtggtgtttcctgcaggccaggccagctgcctccgcgtgatcaaagccacactctgggctccagagtggggatgacatgcactcagctcttggctccactgggatgggaggagaggacaagggaaatgtcaggggcggggagggtgacagtggccgcccaaggccacgagcttgttctttgttctttgtcacagggactgaaaacctctcctcatgttctgctttcgattcgttaagagagcaacattttacccacacacagataaagttttcccttgaggaaacaacagctttaaaagaaaaaagaaaaaaaaagcttggtaagtcaagtag

SEQ ID NO: 23 - DNA, 958 bp, Homo sapiens
ggggccggacgcgaggggcggggcgagcgcgggacaaagggaagcgaagccggagctgcgggcgctttttctgcccgcggtgtctcagattcattcttaaggaactgagaacttaatcttccaaaatgtcaaaaagaccatcttatgccccacctcccaccccagctcctgcaacacaaatgcccagcacaccagggtttgtgggatacaatccatacagtcatctcgcctacaacaactacaggctgggagggaacccgagcaccaacagccgggtcacggcatcctctggtatcacgattccaaaacccccaaagccaccagataagccgctgatgccctacatgaggtacagcagaaaggtctgggaccaagtaaaggcttccaaccctgacctaaagttgtgggagattggcaagattattggtggcatgtggcgagatctcactgatgaagaaaaacaagaatatttaaacgaatacgaagcagaaaagatagagtacaatgaatctatgaaggcctatcataattcccccgcgtaccttgcttacataaatgcaaaaagtcgtgcagaagctgctttagaggaagaaagtcgacagagacaatctcgcatggagaaaggagaaccgtacatgagcattcagcctgctgaagatccagatgattatgatgatggcttttcaatgaagcatacagccaccgcccgtttccagagaaaccaccgcctcatcagtgaaattcttagtgagagtgtggtgccagacgttcggtcagttgtcacaacagctagaatgcaggtcctcaaacggcaggtccagtccttaatggttcatcagcgaaaactagaagctgaacttcttcaaatagaggaacgacaccaggagaagaagaggaaattcctggaaagcacagattcatttaacaatgaacttaaaaggttgtgcggtctgaaagt

SEQ ID NO: 24 - DNA, 6483 bp, Homo sapiens
aagcttctaattgcagttcaaccacctgttacatatcttcaggaaaaaatcacaacctctcaacttcaacttcctcttctataaattagaaataacaataaccacacctgtaaccccagcactttgggaggccaaggcaggcagatcaagaggtgaggagattgagaccatcctggctaacatgatgaaaccctgtctctaccaaaaagacaaaaaattagccaggtatggtggcacacacctgtagtcccagctactcgggaggctgaggcaggagaatggcgtgaacccgggaggtggagcttgcagtgagccgagatggcgccactgcactccagcctgggcgacagagcaagcctccgtctaaaaaaaaaaaaagaaagaaagaaagaaagaaagaaaagaaataataataaccaccattcctatctcaacagcttgttctagaaatttttaaagcacagtatcacaaacagcactacataattgtaaaacatgtatgaatatatacatccaaacaacagcaatgtcatagcctatgggtagatataatcttatacaatgtaccaaaatcccaatttacttcactagacaaactgttataccaaattctgtacacagtatatccaagaaaatgtgttgtttttattgagaaactgaacctagcttgggaacacatgtgcacagtctagttcataatatttggtgcaagtatcattctctaatatagatttacatttttgcaagcaaatttttacttgcaatcgtaacatatccaaattttccctttttactcaatcagaacttagtgtaaagtactacaagttagttcttcggatttcatgctaagaaaataatgcagattttctgcattattatggtcttcacagaaaccttaactatgatgaatttaaaagtgcaaaataatccaggataactttatgatttcacattttttaatgttaaaaataatgccatcattaattagaaaattctaaaatcattacttccactttcttaggcaaaatatcaatatactctcatttgccaaataaattaaaagatctcctacaaacacaatctcctaaattgtggttttatggctttaatgttttatgtgtggcaactattgatgctagttaaaattttagaaactctttctttttgattccctacagttgtctacaagaaccttattgtagcatgatcctgccagactttatactatttgttgctccaattaaaactgtttaaaacatgaatttgaaaaatcttattttaactataattttgtagctgaaacttttttttctaaactttgcaaacattctatgcaacctgaattagtgctgagaaaattggatcttaatggttgctcaatgttcttcaacaggtgaaaagcataataaaacatgctcatctgaactccacccattttcaatttcaacatagcatacctcgtgtttattcttagggcaaattcaaaattgtacatattaggattggttattactgaagataatttatgcaatcataagccaaagatgctaagttggcaaaaagaaaacaatgtaagtaagcaaactctaacacatgtggacacaccctctcagtatataaaggcttgtcactgtccttggtagcaggcactccctgggctaaacagcatcaccatgtctgttcgatacagctcaagcaagcactactcttcctcccgcagtggaggaggaggaggaggaggaggatgtggaggaggaggaggagtgtcatccctaagaatttctagcagcaaaggctcccttggtggaggatttagctcaggggggttcagtggtggctcttttagccgtgggagctctggtgggggatgctttgggggctcatcaggtggctatggaggattaggaggttttggtggaggtagctttcatggaagctatggaagtagcagctttggtgggagttatggaggcagctttggagggggcaatttcggaggtggcagctttggtgggggcagctttggtggaggcggctttggtggaggcggctttggaggaggctttggtggtggatttggaggagatggtggccttctctctggaaatgaaaaagtaaccatgcagaatctgaatgaccgcctggcttcctacttggacaaagttcgggctctggaagaatcaaactatgagctggaaggcaaaatcaaggagtggtatgaaaagcatggcaactcacatcagggggagcctcgtgactacagcaaatactacaaaaccatcgatgaccttaaaaatcaggtaagaggtatttttaaatccagctttaagtatcttgtccatgtaatccagacagatgaatcttaaattaagcacaatgtggctgttcactatgcttacccatgttactttcttccttcaaaaataacccagtctcatcaaagataaacatctgtgaaactatggtcatggcaatcttcatccagcaagtgtgctacttgtcttaagaggatgggagatttactaagcacttttgaggttttaatgagcatacaatgagtccacagttaaaatatgctaggctatttacaaatgtagaaactgaaaaaaaaaatcatgatatgaatcagaacaaaatgttattcagactgataacaagccatattcagtaccaacatggcaagaaaaataaattttccagtatgaaaatgggacactgcttgcttctaaggaatttctgaattgtacctattgtgtaccagttcagagtgtatttatttattagtatttatcatgagttaaacaaatgcaggtgtgagtcagccaaagcatggctgaaatacatggaaatcacatagtctaaaagaggagggcacacttacaggaatacatctatataattccagttagttttcagaaaggaataattcgtgtacagaaatacaagactggagaaattccaagagaacaaataattcaaagttaagtatatgggtaagcctgcaatatttcatatttaaaataaaaaattttcccaagattttgtaagagaacaacataaaagtgcagagtgcatctatgtcactacaaaagccatatctgcatctgacctcttctcaaataactgtgcctctccctccagattctcaacctaacaactgataatgccaacatcctgcttcagatcgacaatgccaggctggcagctgatgacttcaggctgaagtaagttaagtgatcgttgtataatactatcacaacgaatacatcagtggtttttaacaatgacttgggatgccctcaataacatttacatttttctgaattcacccaaagttaaatagtattggagttatctgagaaattttccatgtcagtgttacctttttggcaatattaaaggaagaaaatgcatattaaagtaactgctaaggttttttccattaaaccactattacttctaagagaactgtacatgacaaatattgccattacatgagatcaactatgtagttgctttttaaatagtctctgcccagatacatctcccctatataagttataaccagtattgatatcatgcttgtttcaggtatgagaatgaggtagctctgcgccagagcgtggaggctgacatcaacggcctgcgtagggtgctggatgagctgaccctgaccaaggctgacctggagatgcaaattgagagcctgactgaagagctggcctatctgaagaagaaccacgaggaggtgacacaaaagttatacttttcccagccaaaagagagttcattatggtcctcgtgtagccaataaatctttctgttcctcaaacaggaaatgaaagaccttcgaaatgtgtccactggtgatgtgaatgtggaaatgaatgctgccccgggtgttgatctgactcaacttctgaataacatgagaagccaatatgaacaacttgctgaacaaaaccgcaaagatgctgaagcctggttcaatgaaaaggtaaagtaatcttccttatagtgaaactcatggaggttttatcatttcagaatttcctcacccttttccttgtttttaatactctagagcaaggaactgactacagaaattgataataacattgaacagatatccagctataaatctgagattactgaattgagacgtaatgtacaagctctggagatagaactacagtcccaactggccttggtatgttaactctcatgaaatgacttcaactttatcatacaaagtttcatgctcacctaagaatatgcaatgcaacaaaaaaatgcagagttggaggtaagaaagagaaaacaaagtgaagctcatgttaatggaggaaaagtactactagtgttgatctaaaagtgctgaaactgaaatggtgccattaaacatacaacaaattctgttcattttcttattcttctatataatgccttactaaataatcaaataagcgtcaccatactcaactgaacaaggaagtcactaagccacaaaaaaatccgtttcagaaacaatccctggaagcctccttggcagaaacagaaggtcgctactgtgtgcagctctcacagattcacgcccagatatccgctctggaagaacagttgcaacagattcgagctgaaaccgagtgccagaatactgaataccaacaactcctggatattaagatccgactggagaatgaaattcaaacctaccgcagcctgctagaaggagagggaaggtaaattataacatgaaaagttatcccagtttcttttattcaatattccagatagcaaggcttatctaaaccccaagaagatgccagagaatgagaggaagggaggagagagggtagagtacagaaaaaggagtacgcaaccgcaatctcactttctcatgaatttggcccaaaatgattcttaagagttctgtgaacttaacattgttttcaaaggatgggttttaaaatatatacctggcagggttttattttttcaacacgttttgcttattttctaaattaacggcaactggaaagctacccaccgttttccaacgttagagataaccgaatgtgacctcaccccgtttagttccggaggcggcggacgcggcggcggaagtttcggcggcggctacggcggcggaagctccggcggcggaagctccggcggcggctacggcggcggccacggcggcagttccggcggcggctacggaggcggaagctccggcggcggaagctccggcggcggctacgggggcggaagctccagcggcggccacggcggcggaagctccagcggcggccacggcggcagttccagcggcggctacggtggtggcagttccggcggcggcggcggcggctacgggggcggcagctccggcggcggcagcagctccggcggcggatacggcggcggcagctccagcggaggccacaagtcctcctcttccgggtccgtgggcgagtcttcatctaagggaccaaggtcagcagaaactagctggggtaatctagaattagttttaacttcctgtgatggtttttttgcgctttaagctctagagttgttttaaaaaattaaaaatcttagagacggttccgtttgcatttgttcacaaactactcttaacaccagccgtgaaaaatggcatgatcaaaatgtcataccttaagcatttttttgggcttaacaatgtaaagttgaaatttccttctttttacaatatttgcttgttaattactaaggatccctacagactgtttaaaattttttttccatcattcacacagatactaacaaaaccagagtaatcaagacaattattgaagaggtggcgcccgacggtagagttctttcatctatggttgaatcagaaaccaagaaacactactattaaactgcatcaagaggaaagagtctcccttcacacagaccattatttacagatgcatggaaaacaaagtctccaagaaaacacttctgtcttgatggtctatggaaatagaccttgaaaataaggtgtctacaaggtgttttgtggtttctgtatttcttcttttcactttaccacaaagtgttctttaatggaaagaaaaacaactttgtgttctcatttactaatgaatttcaataaactttcttactgatgcaaactatcccaatttgtcagaatttatctttacttaagtacataatactctttaaaattaaagattagtaacccatagcagttgaaggttgatgtatccagaaattcggaagacagaactattgtcatgccttttctaagttttttaatcatgtatgttcagaccaccgtcagtaaattcactgagtaaagtctgtaaatccccaatattactctttaagatacacaatatgtggaaggctcccagctctctggctttaaattatttcaatcctggaaattctggaatatctcaaatataacccccaaaataataataa

SEQ ID NO: 25 - DNA, 1871 bp, Homo sapiens
agttgtggccaccttccccaggccatggatctctccaacaacaccatgtcactctcagtgcgcacccccggactgtcccggcggctctcctcgcagagtgtgataggcagacccaggggcatgtctgcttccagtgttggaagtggttatgggggaagtgcctttggctttggagccagctgtgggggaggcttttctgctgcttccatgtttggttctagttccggctttgggggtggctccggaagttccatggcaggaggactgggtgctggttatgggagagccctgggtggaggtagctttggagggctggggatgggatttgggggcagcccaggaggtggctctctaggtattctctcgggcaatgatggaggccttctttctggatcagaaaaagaaactatgcaaaatcttaatgatagattagcttcctacctggataaggtgcgagctctagaagaggctaatactgagctagaaaataaaattcgagaatggtatgaaacacgaggaactgggactgcagatgcttcacagagcgattacagcaaatattatccactgattgaagacctcaggaataagatcatttcagccagcattggaaatgcccagctcctcttgcagattgacaatgcgagactagctgctgaggacttcaggatgaagtatgagaatgaactggccctgcgccagggcgtagaggccgacatcaatggcctgcgccgggtgctggacgagctgaccctgaccaggaccgacctggagatgcagatcgagagcctgaacgaggagctggcctacatgaagaagaaccacgaggatgagctccaaagcttccgggtgggcggcccaggcgaggtcagcgtagaaatggacgctgcccccggagtggacctcaccaggctcctcaatgatatgcgggcgcagtatgaaaccatcgctgagcagaatcggaaggacgctgaagcctggttcattgaaaagagcggggagctccgtaaggagattagcaccaacaccgagcagcttcagtccagcaagagcgaggtcaccgacctgcgtcgcgcctttcagaacctggagatcgagctacagtcccagctcgccatgaagaaatccctggaggactccttggccgaagccgagggcgattactgcgcgcagctgtcccaggtgcagcagctcatcagcaacctggaggcacagctgctccaggtgcgcgcggacgcagagcgccagaacgtggaccaccagcggctgctgaatgtcaaggcccgcctggagctggagattgagacctaccgccgcctgctggacggggaggcccaaggtgatggtttggaggaaagtttatttgtgacagactccaaatcacaagcacagtcaactgattcctctaaagacccaaccaaaacccgaaaaatcaagacagttgtgcaggagatggtgaatggtgaggtggtctcatctcaagttcaggaaattgaagaactaatgtaaaatttcacaagatctgccccatgattggttccttaggaacaagaaatttacaagtagaaattattcctttcagagtaacatgctgtattacttcaatccctatttttgtctgttccattttctttggattccctattcacattgaatcctttttgcccttctgaaacaatattcagtcacaagtcattttggtcatgttggtctttgtaacaaatcaaaattaccttatatccttctggacaactggagtagtcttttaacgaactttcttctggtaacccggaatattttcttaatcatagagctttactcaagtagtattgttttaatagagttaattgtaataaaagatgaatggtaaa

SEQ ID NO: 26 - DNA, 1447 bp, Homo sapiens
ctgcaactggttctgcgagggctccttcaatggcagcgagaaggagactatgcagttcctgaacgaccgcctggccagctacctggagaaggtgcgtcacgtggagcgggacaacgcggagctggagaacctcatccgggagcggtctcagcagcaggagcccttgctgtgccccagctaccagtcctacttcaagaccattgaggagctccagcagaagatcctgtgcagcaagtctgagaatgccaggctggtggtgcagatcgacaatgccaagctggctgcagatgacttcagaaccaagtaccagacggagcagtccctgcggcagctggtggagtccgacatcaacagcctgcgcaggattctggatgagctgaccctgtgcaggtctgacctggaggcccagatggagtccctgaaggaggagctgctgtccctcaagcagaaccatgagcaggaagtcaacaccttgcgctgccagcttggagaccgcctcaacgtggaggtggacgctgctcccgctgtggacctgaaccaggtcctgaacgagaccaggaatcagtatgaggccctggtggaaaccaaccgcagggaagtggagcaatggttcgccacgcagaccgaggagctgaacaagcaggtggtatccagctcggagcagctgcagtcctaccaggcggagatcatcgagctgagacgcacagtcaatgccctggagatcgagctgcaggcccagcacaacctgcgatactctctggaaaacacgctgacagagagcgaggcccgctacagctcccagctgtcccaggtgcagagcctgatcaccaacgtggagtcccagctggcggagatccgcagtgacctggagcggcagaaccaggagtatcaggtgctgctggacgtgcgggcgcggctggagtgtgagatcaacacataccggagcctgctggagagcgaggactgcaagctgccctccaacccctgcgccaccaccaatgcatgtgaaaagcccattggatcctgtgtcaccaatccttgtggtcctcgttcccgctgtgggccttgcaacacctttgggtactagataccctggggccagcagaagtatagcatgaagacagaactaccatcggtgggccagttctgcctctctgacaaccatcagccaccggaccccaccccgaggcatcaccacaaatcatggtctggaaggagaacaaatgcccagcgtttgggtctgactctgagcctagggctactgatcctcctcaccccaggtccctctcctgtagtcagtctgagttctgatggtcagaggttggagctgtgacagtggcatacgaggtgttttgttctctctgctgcttctacctttattgcagttccccaaatcgcctaataaactttcctcttgcaaagcagacaaaaaaaaaaaaaaaaaaaa

SEQ ID NO: 27 - protein, 261 aa, Homo sapiens
MNPNCARCGKIVYPTEKVNCLDKFWHKACFHCETCKMTLNMKNYKGYEKKPYCNAHYPKQSFTMVADTPENLRLKQQSELQSQVRYKEEFEKNKGKGFSVVADTPELQRIKKTQDQISNIKYHEEFEKSRMGPSGGEGMEPERRDSQDGSSYRRPLEQQQPHHIPTSAPVYQQPQQQPVAQSYGGYKEPAAPVSIQRSAPGGGGKRYRAVYDYSAADEDEVSFQDGDTIVNVQQIDDGWMYGTVERTGDTGMLPANYVEAI

SEQ ID NO: 28 - protein, 478 aa, Homo sapiens
MVQKTSMSRGPYPPSQEIPMEVFDPSPQGKYSKRKGRFKRSDGSTSSDTTSNSFVRQGSAESYTSRPSDSDVSLEEDREALRKEAERQALAQLEKAKTKPVAFAVRTNVGYNPSPGDEVPVQGVAITFEPKDFLHIKEKYNNDWWIGRLVKEGCEVGFIPSPVKLDSLRLLQEQKLRQNRLGSSKSGDNSSSSLGDVVTGTRRPTPPASAKQKQKSTEHVPPYDVVPSMRPIILVGPSLKGYEVTDMMQKALFDFLKHRFDGRISITRVTADISLAKRSVLNNPSKHIIIERSNTRSSLAEVQSEIERIFELARTLQLVALDADTINHPAQLSKTSLAPIIVYIKITSPKVLQRLIKSRGKSQSKHLNVQIAASEKLAQCPPEMFDIILDENQLEDACEHLAEYLEAYWKATHPPSSTPPNPLLNRTMATAALRRSPAPVSNLQVQVLTSLRRNLGFWGGLESSQRGSVVPQEQEHAM

SEQ ID NO: 29 - protein, 196 aa, Homo sapiens [sequence omitted]

SEQ ID NO: 30 - protein, 1566 aa, Homo sapiens [sequence omitted]

SEQ ID NO: 31 - protein, 1490 aa, Homo sapiens
MPNSERHGGKKDGSGGASGTLQPSSGGGSSNSRERHRLVSKHKRHKSKHSKDMGLVTPEAASLGTVIKPLVEYDDISSDSDTFSDDMAFKLDRRENDERRGSDRSDRLHKHRHHQHRRSRDLLKAKQTEKEKSQEVSSKSGSMKDRISGSSKRSNEETDDYGKAQVAKSSSKESRSSKLHKEKTRKERELKSGHKDRSKSHRKRETPKSYKTVDSPKRRSRSPHRKWSDSSKQDDSPSGASYGQDYDLSPSRSHTSSNYDSYKKSPGSTSRRQSVSPPYKEPSAYQSSTRSPSPYSRRQRSVSPYSRRRSSSYERSGSYSGRSPSPYGRRRSSSPFLSKRSLSRSPLPSRKSMKSRSRSPAYSRHSSSHSKKKRSSSRSRHSSISPVRLPLNSSLGAELSRKKKERAAAAAAAKMDGKESKGSPVFLPRKENSSVEAKDSGLESKKLPRSVKLEKSAPDTELVNVTHLNTEVKNSSDTGKVKLDENSEKHLVKDLKAQGTRDSKPIALKEEIVTPKETETSEKETPPPLPTIASPPPPLPTTTPPPQTPPLPPLPPIPALPQQPPLPPSQPAFSQVPASSTSTLPPSTHSKTSAVSSQANSQPPVQVSVKTQVSVTAAIPHLKTSTLPPLPLPPLLPGGDDMDSPKETLPSKPVKKEKEQRTRHLLTDLPLPPELPGGDLSPPDSPEPKAITPPQQPYKKRPKICCPRYGERRQTESDWGKRCVDKFDIIGIIGEGTYGQVYKARDKDTGELVALKKVRLDNEKEGFPITAIREIKILRQLIHRSVVNMKEIVTDKQDALDFKKDKGAFYLVFEYMDHDLMGLLESGLVHFSEDHIKSFMKQLMEGLEYCHKKNFLHRDIKCSNILLNNSGQIKLADFGLARLYNSEESRPYTNKVITLWYRPPELLLGEERYTPAIDVWSCGCILGELFTKKPIFQANLELAQLELISRLCGSPCPAVWPDVIKLPYFNTMKPKKQYRRRLREEFSFIPSAALDLLDHMLTLDPSKRCTAEQTLQSDFLKDVELSKMAPPDLPHWQDCHELWSKKRRRQRQSGVVVEEPPPSKTSRKETTSGTSTEPVKNSSPAPPQPAPGKVESGAGDAIGLADITQQLNQSELAVLLNLLQSQTDLSIPQMAQLLNIHSNPEMQQQLEALNQSISALTEATSQQQDSETMAPEESLKEAPSAPVILPSAEQMTLEASSTPADMQNILAVLLSQLMKTQEPAGSLEENNSDKNSGPQGPRRTPTMPQEEAAACPPHILPPEKRPPEPPGPPPPPPPPPLVEGDLSSAPQELNPAVTAALLQLLSQPEAEPPGHLPHEHQALRPMEYSTRPRPNRTYGNTDGPETGFSAIDTDERNSGPALTESLVQTLVKNRTFSGSLSHLGESSSYQGTGSVQFPGDQDLRFARVPLALHPVVGQPFLKAEGSSNSVVHAETKLQNYGELGPGTTGASSSGAGLHWGGPTQSSAYGKLYRGPTRVPPRGGRGRGVPY

SEQ ID NO: 32 - protein, 381 aa, Homo sapiens [sequence omitted]

SEQ ID NO: 33 - protein, 445 aa, Homo sapiens
MSKLPRELTRDLERSLPAVASLGSSLSHSQSLSSHLLPPPEKRRAISDVRRTFCLFVTFDLLFISLLWIIELNTNTGIRKNLEQEIIQYNFKTSFFDIFVLAFFRFSGLLLGYAVLQLRHWWVIAVTTLVSSAFLIVKVILSELLSKGAFGYLLPIVSFVLAWLETWFLDFKVLPQEAEEERWYLAAQVAVARGPLLFSGALSEGQFYSPPESFAGSDNESDEEVAGKKSFSAQEREYIRQGKEATAVVDQILAQEENWKFEKNNEYGDTVYTIEVPFHGKTFILKTFLPCPAELVYQEVILQPERMVLWNKTVTACQILQRVEDNTLISYDVSAGAAGGVVSPRDFVNVRRIERRRDRYLSSGIATSHSAKPPTHKYVRGENGPGGFIVLKSASNPRVCTFVWILNTDLKGRLPRYLIHQSLAATMFEFAFHLRQRISELGARA

SEQ ID NO: 34 - protein, 167 aa, Homo sapiens
MATSELSCEVSEENCERREAFWAEWKDLTLSTRPEEGCSLHEEDTQRHETYHQQGQCQVLVQRSPWLMMRMGILGRGLQEYQLPYQRVLPLPIFTPAKMGATKEEREDTPIQLQELLALETALGGQCVDRQEVAEITKQLPPVVPVSKPGALRRSLSRSMSQEAQRG

SEQ ID NO: 35 - protein, 282 aa, Homo sapiens
MSGADRSPNAGAAPDSAPGQAAVASAYQRFEPRAYLRNNYAPPRGDLCNPNGVGPWKLRCLAQTFATGEVSGRTLIDIGSGPTVYQLLSACSHFEDITMTDFLEVNRQELGRWLQEEPGAFNWSMYSQHACLIEGKGECWQDKERQLRARVKRVLPIDVHQPQPLGAGSPAPLPADALVSAFCLEAVSPDLASFQRALDHITTLLRPGGHLLLIGALEESWYLAGEARLTVVPVSEEEVREALVRSGYKVRDLRTYIMPAHLQTGVDDVKGVFFAWAQKVGL

SEQ ID NO: 36 - protein, 1255 aa, Homo sapiens
MELAALCRWGLLLALLPPGAASTQVCTGTDMKLRLPASPETHLDMLRHLYQGCQVVQGNLELTYLPTNASLSFLQDIQEVQGYVLIAHNQVRQVPLQRLRIVRGTQLFEDNYALAVLDNGDPLNNTTPVTGASPGGLRELQLRSLTEILKGGVLIQRNPQLCYQDTILWKDIFHKNNQLALTLIDTNRSRACHPCSPMCKGSRCWGESSEDCQSLTRTVCAGGCARCKGPLPTDCCHEQCAAGCTGPKHSDCLACLHFNHSGICELHCPALVTYNTDTFESMPNPEGRYTFGASCVTACPYNYLSTDVGSCTLVCPLHNQEVTAEDGTQRCEKCSKPCARVCYGLGMEHLREVRAVTSANIQEFAGCKKIFGSLAFLPESFDGDPASNTAPLQPEQLQVFETLEEITGYLYISAWPDSLPDLSVFQNLQVIRGRILHNGAYSLTLQGLGISWLGLRSLRELGSGLALIHHNTHLCFVHTVPWDQLFRNPHQALLHTANRPEDECVGEGLACHQLCARGHCWGPGPTQCVNCSQFLRGQECVEECRVLQGLPREYVNARHCLPCHPECQPQNGSVTCFGPEADQCVACAHYKDPPFCVARCPSGVKPDLSYMPIWKFPDEEGACQPCPINCTHSCVDLDDKGCPAEQRASPLTSIVSAVVGILLVVVLGVVFGILIKRRQQKIRKYTMRRLLQETELVEPLTPSGAMPNQAQMRILKETELRKVKVLGSGAFGTVYKGIWIPDGENVKIPVAIKVLRENTSPKANKEILDEAYVMAGVGSPYVSRLLGICLTSTVQLVTQLMPYGCLLDHVRENRGRLGSQDLLNWCMQIAKGMSYLEDVRLVHRDLAARNVLVKSPNHVKITDFGLARLLDIDETEYHADGGKVPIKWMALESILRRRFTHQSDVWSYGVTVWELMTFGAKPYDGIPAREIPDLLEKGERLPQPPICTIDVYMIMVKCWMIDSECRPRFRELVSEFSRMARDPQRFVVIQNEDLGPASPLDSTFYRSLLEDDDMGDLVDAEEYLVPQQGFFCPDPAPGAGGMVHHRHRSSSTRSGGGDLTLGLEPSEEEAPRSPLAPSEGAGSDVFDGDLGMGAAKGLQSLPTHDPSPLQRYSEDPTVPLPSETDGYVAPLTCSPQPEYVNQPDVRPQPPSPREGPLPAARPAGATLERAKTLSPGKNGVVKDVFAFGGAVENPEYLTPQGGAAPQPHPPPAFSPAFDNLYYWDQDPPERGAPPSTFKGTPTAENPEYLGLDVPV

SEQ ID NO: 37 - protein, 532 aa, Homo sapiens
MELDLSPPHLSSSPEDLWPAPGTPPGTPRPPDTPLPEEVKRSQPLLIPTTGRKLREEERRATSLPSIPNPFPELCSPPSQSPILGGPSSARGLLPRDASRPHVVKVYSEDGACRSVEVAAGATARHVCEMLVQRAHALSDETWGLVECHPHLALERGLEDHESVVEVQAAWPVGGDSRFVFRKNFAKYELFKSSPHSLFPEKMVSSCLDAHTGISHEDLIQNFLNAGSFPEIQGFLQLRGSGRKLWKRFFCFLRRSGLYYSTKGTSKDPRHLQYVADVNESNVYVVTQGRKLYGMPTDFGFCVKPNKLRNGHKGLRIFCSEDEQSRTCWLAAFRLFKYGVQLYKNYQQAQSRHLHPSCLGSPPLRSASDNTLVAMDFSGHAGRVIENPREALSVALEEAQAWRKKTNHRLSLPMPASGTSLSAAIHRTQLWFHGRISREESQRLIGQQGLVDGLFLVRESQRNPQGFVLSLCHLQKVKHYLILPSEEEGRLYFSMDDGQTRFTDLLQLVEFHQLNRGILPCLLRHCCTRVAL

SEQ ID NO: 38 - protein, 534 aa, Homo sapiens [sequence omitted]

SEQ ID NO: 39 - protein, 207 aa, Homo sapiens
MAGPATQSPMKLMALQLLLWHSALWTVQEATPLGPASSLPQSFLLKCLEQVRKIQGDGAALQEKLVSECATYKLCHPEELVLLGHSLGIPWAPLSSCPSQALQLAGCLSQLHSGLFLYQGLLQALEGISPELGPTLDTLQLDVADFATTIWQQMEELGMAPALQPTQGAMPAFASAFQRRAGGVLVASHLQSFLEVSYRVLRHLAQP

SEQ ID NO: 40 - protein, 989 aa, Homo sapiens
MKVVNLKQAILQAWKERWSYYQWAINMKKFFPKGATWDILNLADALLEQAMIGPSPNPLILSYLKYAISSQMVSYSSVLTAISKFDDFSRDLCVQALLDIMDMFCDRLSCHGKAEECIGLCRALLSALHWLLRCTAASAERLREGLEAGTPAAGEKQLAMCLQRLEKTLSSTKNRALLHIAKLEEASSWTAIEHSLLKLGEILTNLSNPQLRSQAEQCGTLIRSIPTMLSVHAEQMHKTGFPTVHAVILLEGTMNLTGETQSLVEQLTMVKRMQHIPTPLFVLEIWKACFVGLIESPEGTEELKWTAFTFLKIPQVLVKLKKYSHGDKDFTEDVNCAFEFLLKLTPLLDKADQRCNCDCTNFLLQECGKQGLLSEASVNNLMAKRKADREHAPQQKSGENANIQPNIQLILRAEPTVTNILKTMDADHSKSPEGLLGVLGHMLSGKSLDLLLAAAAATGKLKSFARKFINLNEFTTYGSEESTKPASVRALLFDISFLMLCHVAQTYGSEVILSESRTGAEVPFFETWMQTCMPEEGKILNPDHPCFRPDSTKVESLVALLNNSSEMKLVQMKWHEACLSISAAILEILNAWENGVLAFESIQKITDNIKGKVCSLAVCAVAWLVAHVRMLGLDEREKSLQMIRQLAGPLFSENTLQFYNERVVIMNSILERMCADVLQQTATQIKFPSTGVDTMPYWNLLPPKRPIKEVLTDIFAKVLEKGWVDSRSIHIFDTLLHMGGVYWFCNNLIKELLKETRKEHTLRAVELLYSIFCLDMQQVTLVLLGHILPGLLTDSSKWHSLMDPPGTALAKLAVWCALSSYSSHKGQASTRQKKRHREDIEDYISLFPLDDVQPSKLMRLLSSNEDDANILSSPTDRSMSSSLSASQLHTVNMRDPLNRVLANLFLLISSILGSRTAGPHTQFVQWFMEECVDCLEQGGRGSVLQFMPFTTVSELVKVSAMSSPKVVLAITDLSLPLGRQVAAKAIAAL

SEQ ID NO: 41 - protein, 490 aa, Homo sapiens
MEQKPSKVECGSDPEENSARSPDGKRKRKNGQCSLKTSMSGYIPSYLDKDEQCVVCGDKATGYHYRCITCEGCKGFFRRTIQKNLHPTYSCKYDSCCVIDKITRNQCQLCRFKKCIAVGMAMDLVLDDSKRVAKRKLIEQNRERRRKEEMIRSLQQRPEPTPEEWDLIHIATEAHRSTNAQGSHWKQRRKFLPDDIGQSPIVSMPDGDKVDLEAFSEFTKIITPAITRVVDFAKKLPMFSELPCEDQIILLKGCCMEIMSLRAAVRYDPESDTLTLSGEMAVKREQLKNGGLGVVSDAIFELGKSLSAFNLDDTEVALLQAVLLMSTDRSGLLCVDKIEKSQEAYLLAFEHYVNHRKHNIPHFWPKLLMKEREVQSSILYKGAAAEGRPGGSLGVHPEGQQLLGMHVVQGPQVRQLEQQLGEAGSLQGPVLQHQSPKSPQQRLLELLHRSGILHARAVCGEDDSSEADSPSSSEEEPEVCEDLAGNAASP

SEQ ID NO: 42 - protein, 614 aa, Homo sapiens
MTTLDSNNNTGGVITYIGSSGSSPSRTSPESLYSDNSNGSFQSLTQGCPTYFPPSPTGSLTQDPARSFGSIPPSLSDDGSPSSSSSSSSSSSSFYNGSPPGSLQVAMEDSSRVSPSKSTSNITKLNGMVLLCKVCGDVASGFHYGVLACEGCKGFFRRSIQQNIQYKRCLKNENCSIVRINRNRCQQCRFKKCLSVGMSRDAVRFGRIPKREKQRMLAEMQSAMNLANNQLSSQCPLETSPTQHPTPGPMGPSPPPAPVPSPLVGFSQFPQQLTPPRSPSPEPTVEDVISQVARAHREIFTYAHDKLGSSPGNFNANHASGSPPATTPHRWENQGCPPAPNDNNTLAAQRHNEALNGLRQAPSSYPPTWPPGPAHHSCHQSNSNGHRLCPTHVYAAPEGKAPANSPRQGNSKNVLLACPMNMYPHGRSGRTVQEIWEDFSMSFTPAVREVVEFAKHIPGFRDLSQHDQVTLLKAGTFEVLMVRFASLFNVKDQTVMFLSRTTYSLQELGAMGMGDLLSAMFDFSEKLNSLALTEEELGLFTAVVLVSADRSGMENSASVEQLQETLLRALRALVLKNRPLETSRFTKLLLKLPDLRTLNNMHSEKLLSFRVDAQ

SEQ ID NO: 43 - protein, 703 aa, Homo sapiens
MADRRRQRASQDTEDEESGASGSDSGGSPLRGGGSCSGSAGGGGSGSLPSQRGGRTGALHLRRVESGGAKSAEESECESEDGIEGDAVLSDYESAEDSEGEEGEYSEEENSKVELKSEANDAVNSSTKEEKGEEKPDTKSTVTGERQSGDGQESTEPVENKVGKKGPKHLDDDEDRKNPAYIPRKGLFFEHDLRGQTQEEEVRPKGRQRKLWKDEGRWEHDKFREDEQAPKSRQELIALYGYDIRSAHNPDDIKPRRIRKPRYGSPPQRDPNWNGERLNKSHRHQGLGGTLPPRTFINRNAAGTGRMSAPRNYSRSGGFKEGRAGFRPVEAGGQHGGRSGETVKHEISYRSRRLEQTSVRDPSPEADAPVLGSPEKEEAASEPPAAAPDAAPPPPDRPIEKKSYSRARRTRTKVGDAVKLAEEVPPPPEGLIPAPPVPETTPTPPTKTGTWEAPVDSSTSGLEQDVAQLNIAEQNWSPGQPSFLQPRELRGMPNHIHMGAGPPPQFNRMEEMGVQGGRAKRYSSQRQRPVPEPPAPPVHISIMEGHYYDPLQFQGPIYTHGDSPAPLPPQGMLVQPGMNLPHPGLHPHQTPAPLPNPGLYPPPVSMSPGQPPPQQLLAPTYFSAPGVMNFGNPSYPYAPGALPPPPPPHLYPNTQAPSQVYGGVTYYNPAQQQVQPKPSPPRRTPQPVTIKPPPPEVVSRGSS

SEQ ID NO: 44 - protein, 560 aa, Homo sapiens
MPQTRSQAQATISFPKRKLSRALNKAKNSSDAKLEPTNVQTVTCSPRVKALPLSPRKRLGDDNLCNTPHLPPCSPPKQGKKENGPPHSHTLKGRRLVFDNQLTIKSPSKRELAKVHQNKILSSVRKSQEITTNSEQRCPLKKESACVRLFKQEGTCYQQAKLVLNTAVPDRLPAREREMDVIRNFLREHICGKKAGSLYLSGAPGTGKTACLSRILQDLKKELKGFKTIMLNCMSLRTAQAVFPAIAQEICQEEVSRPAGKDMMRKLEKHMTAEKGPMIVLVLDEMDQLDSKGQDVLYTLFEWPWLSNSHLVLIGIANTLDLTDRILPRLQAREKCKPQLLNFPPYTRNQIVTILQDRLNQVSRDQVLDNAAVQFCARKVSAVSGDVRKALDVCRRAIEIVESDVKSQTILKPLSECKSPSEPLIPKRVGLIHISQVISEVDGNRMTLSQEGAQDSFPLQQKILVCSLMLLIRQLKIKEVTLGKLYEAYSKVCRKQQVAAVDQSECLSLSGLLEARGILGLKRNKETRLTKVFFKIEEKEIEHALKDKALIGNILATGLP

SEQ ID NO: 45 - protein, 462 aa, Homo sapiens
MASNSSSCPTPGGGHLNGYPVPPYAFFFPPMLGGLSPPGALTTLQHQLPVSGYSTPSPATIETQSSSSEEIVPSPPSPPPLPRIYKPCFVCQDKSSGYHYGVSACEGCKGFFRRSIQKNMVYTCHRDKNCIINKVTRNRCQYCRLQKCFEVGMSKESVRNDRNKKKKEVPKPECSESYTLTPEVGELIEKVRKAHQETFPALCQLGKYTTNNSSEQRVSLDIDLWDKFSELSTKCIIKTVEFAKQLPGFTTLTIADQITLLKAACLDILILRICTRYTPEQDTMTFSDGLTLNRTQMHNAGFGPLTDLVFAFANQLLPLEMDDAETGLLSAICLICGDRQDLEQPDRVDMLQEPLLEALKVYVRKRRPSRPHMFPKMLMKITDLRSISAKGAERVITLKMEIPGSMPPLIQEMLENSEGLDTLSGQPGGGGRDGGGLAPPPGSCSPSLSPSSNRSSPATHSP

SEQ ID NO: 46 - protein, 1531 aa, Homo sapiens
MEVSPLQPVNENMQVNKIKKNEDAKKRLSVERIYQKKTQLEHILLRPDTYIGSVELVTQQMWVYDEDVGINYREVTFVPGLYKIFDEILVNAADNKQRDPKMSCIRVTIDPENNLISIWNNGKGIPVVEHKVEKMYVPALIFGQLLTSSNYDDDEKKVTGGRNGYGAKLCNIFSTKFTVETASREYKKMFKQTWMDNMGRAGEMELKPFNGEDYTCITFQPDLSKFKMQSLDKDIVALMVRRAYDIAGSTKDVKVFLNGNKLPVKGFRSYVDMYLKDKLDETGNSLKVIHEQVNHRWEVCLTMSEKGFQQISFVNSIATSKGGRHVDYVADQIVTKLVDVVKKKNKGGVAVKAHQVKNHMWIFVNALIENPTFDSQTKENMTLQPKSFGSTCQLSEKFIKAAIGCGIVESILNWVKFKAQVQLNKKCSAVKHNRIKGIPKLDDANDAGGRNSTECTLILTEGDSAKTLAVSGLGVVGRDKYGVFPLRGKILNVREASHKQIMENAEINNIIKIVGLQYKKNYEDEDSLKTLRYGKIMIMTDQDQDGSHIKGLLINFIHHNWPSLLRHRFLEEFITPIVKVSKNKQEMAFYSLPEFEEWKSSTPNHKKWKVKYYKGLGTSTSKEAKEYFADMKRHRIQFKYSGPEDDAAISLAFSKKQIDDRKEWLTNFMEDRRQRKLLGLPEDYLYGQTTTYLTYNDFINKELILFSNSDNERSIPSMVDGLKPGQRKVLFTCFKRNDKREVKVAQLAGSVAEMSSYHHGEMSLMMTIINLAQNFVGSNNLNLLQPIGQFGTRLHGGKDSASPRYIFTMLSSLARLLFPPKDDHTLKFLYDDNQRVEPEWYIPIIPMVLINGAEGIGTGWSCKIPNFDVREIVNNIRRLMDGEEPLPMLPSYKNFKGTIEELAPNQYVISGEVAILNSTTIEISELPVRTWTQTYKEQVLEPMLNGTEKTPPLITDYREYHTDTTVKFVVKMTEEKLAEAERVGLHKVFKLQTSLTCNSMVLFDHVGCLKKYDTVLDILRDFFELRLKYYGLRKEWLLGMLGAESAKLNNQARFILEKIDGKIIIENKPKKELIKVLIQRGYDSDPVKAWKEAQQKVPDEEENEESDNEKETEKSDSVTDSGPTFNYLLDMPLWYLTKEKKDELCRLRNEKEQELDTLKRKSPSDLWKEDLATFIEELEAVEAKEKQDEQVGLPGKGGKAKGKKTQMAEVLPSPRGQRVIPRITIEMKAEAEKKNKKKIKNENTEGSPQEDGVELEGLKQRLEKKQKREPGTKTKKQTTLAFKPIKKGKKRNPWSDSESDRSSDESNFDVPPRETEPRRAATKTKFTMDLDSDEDFSDFDEKTDDEDFVPSDASPPKTKTSPKLSNKELKPQKSVVSDLEADDVKGSVPLSSSPPATHFPDETEITNPVPKKNVTVKKTAAKSQSSTSTTGAKKRAAPKGTKRDPALNSGVSQKPDPAKTKNRRKRKPSTSDDSDSNFEKIVSKAVTSKKSKGESDDFHMDFDSAVAPRAKSVRAKKPIKYLEESDEDDLF

SEQ ID NO: 47 - protein, 258 aa, Homo sapiens
MLPLCLVAALLLAAGPGPSLGDEAIHCPPCSEEKLARCRPPVGCEELVREPGCGCCATCALGLGMPCGVYTPRCGSGLRCYPPRGVEKPLHTLMHGQGVCMELAEIEAIQESLQPSDKDEGDHPNNSFSPCSAHDRRCLQKHFAKIRDRSTSGGKMKVNGAPREDARPVPQGSCQSELHRALERLAASQSRTHEDLYIIPIPNCDRNGNFHPKQCHPALDGQRGKCWCVDRKTGVKLPGGLEPKGELDCHQLADSFRE

SEQ ID NO: 48 - protein, 378 aa, Homo sapiens
MDLGKPMKSVLVVALLVIFQVCLCQDEVTDDYIGDNTTVDYTLFESLCSKKDVRNFKAWFLPIMYSIICFVGLLGNGLVVLTYIYFKRLKTMTDTYLLNLAVADILFLLTLPFWAYSAAKSWVFGVHFCKLIFAIYKMSFFSGMLLLLCISIDRYVAIVQAVSAHRHRARVLLISKLSCVGIWILATVLSIPELLYSDLQRSSSEQAMRCSLITEHVEAFITIQVAQMVIGFLVPLLAMSFCYLVIIRTLLQARNFERNKAIKVIIAVVVVFIVFQLPYNGVVLAQTVANFNITSSTCELSKQLNIAYDVTYSLACVRCCVNPFLYAFIGVKFRNDLFKLFKDLGCLSQEQLRQWSSCRHIRRSSMSVEAETTTTFSP

SEQ ID NO: 49 - protein, 411 aa, Homo sapiens
MSKRPSYAPPPTPAPATQMPSTPGFVGYNPYSHLAYNNYRLGGNPSTNSRVTASSGITIPKPPKPPDKPLMPYMRYSRKVWDQVKASNPDLKLWEIGKIIGGMWRDLTDEEKQEYLNEYEAEKIEYNESMKAYHNSPAYLAYINAKSRAEAALEEESRQRQSRMEKGEPYMSIQPAEDPDDYDDGFSMKHTATARFQRNHRLISEILSESVVPDVRSVVTTARMQVLKRQVQSLMVHQRKLEAELLQIEERHQEKKRKFLESTDSFNNELKRLCGLKVEVDMEKIAAEIAQAEEQARKRQEEREKEAAEQAERSQSSIVPEEEQAANKGEEKKDDENIPMETEETHLEETTESQQNGEEGTSTPEDKESGQEGVDSMAEEGTSDSNTGSESNSATVEEPPTDPIPEDEKKE

SEQ ID NO: 50 - protein, 593 aa, Homo sapiens
MSVRYSSSKHYSSSRSGGGGGGGGCGGGGGVSSLRISSSKGSLGGGFSSGGFSGGSFSRGSSGGGCFGGSSGGYGGLGGFGGGSFHGSYGSSSFGGSYGGSFGGGNFGGGSFGGGSFGGGGFGGGGFGGGFGGGFGGDGGLLSGNEKVTMQNLNDRLASYLDKVRALEESNYELEGKIKEWYEKHGNSHQGEPRDYSKYYKTIDDLKNQILNLTTDNANILLQIDNARLAADDFRLKYENEVALRQSVEADINGLRRVLDELTLTKADLEMQIESLTEELAYLKKNHEEEMKDLRNVSTGDVNVEMNAAPGVDLTQLLNNMRSQYEQLAEQNRKDAEAWFNEKSKELTTEIDNNIEQISSYKSEITELRRNVQALEIELQSQLALKQSLEASLAETEGRYCVQLSQIHAQISALEEQLQQIRAETECQNTEYQQLLDIKIRLENEIQTYRSLLEGEGSSGGGGRGGGSFGGGYGGGSSGGGSSGGGYGGGHGGSSGGGYGGGSSGGGSSGGGYGGGSSSGGHGGGSSSGGHGGSSSGGYGGGSSGGGGGGYGGGSSGGGSSSGGGYGGGSSSGGHKSSSSGSVGESSSKGPRY

SEQ ID NO: 51 - protein, 494 aa, Homo sapiens
MDLSNNTMSLSVRTPGLSRRLSSQSVIGRPRGMSASSVGSGYGGSAFGFGASCGGGFSAASMFGSSSGFGGGSGSSMAGGLGAGYGRALGGGSFGGLGMGFGGSPGGGSLGILSGNDGGLLSGSEKETMQNLNDRLASYLDKVRALEEANTELENKIREWYETRGTGTADASQSDYSKYYPLIEDLRNKIISASIGNAQLLLQIDNARLAAEDFRMKYENELALRQGVEADINGLRRVLDELTLTRTDLEMQIESLNEELAYMKKNHEDELQSFRVGGPGEVSVEMDAAPGVDLTRLLNDMRAQYETIAEQNRKDAEAWFIEKSGELRKEISTNTEQLQSSKSEVTDLRRAFQNLEIELQSQLAMKKSLEDSLAEAEGDYCAQLSQVQQLISNLEAQLLQVRADAERQNVDHQRLLNVKARLELEIETYRRLLDGEAQGDGLEESLFVTDSKSQAQSTDSSKDPTKTRKIKTVVQEMVNGEVVSSQVQEIEELM

SEQ ID NO: 52 - protein, 361 aa, Homo sapiens
CNWFCEGSFNGSEKETMQFLNDRLASYLEKVRHVERDNAELENLIRERSQQQEPLLCPSYQSYFKTIEELQQKILCSKSENARLVVQIDNAKLAADDFRTKYQTEQSLRQLVESDINSLRRILDELTLCRSDLEAQMESLKEELLSLKQNHEQEVNTLRCQLGDRLNVEVDAAPAVDLNQVLNETRNQYEALVETNRREVEQWFATQTEELNKQVVSSSEQLQSYQAEIIELRRTVNALEIELQAQHNLRYSLENTLTESEARYSSQLSQVQSLITNVESQLAEIRSDLERQNQEYQVLLDVRARLECEINTYRSLLESEDCKLPSNPCATTNACEKPIGSCVTNPCGPRSRCGPCNTFGY

SEQ ID NO: 53 - DNA, 3282 bp, Homo sapiens
atgaaggagatggtaggaggctgctgcgtatgttcggacgagaggggctgggccgagaacccgctggtctactgcgatgggcacgcgtgcagcgtggccgtccaccaagcttgctatggcatcgttcaggtgccaacgggaccctggttctgccggaaatgtgaatctcaggagcgagcagccagggtgaggtgtgagctgtgcccacacaaagacggggcattgaagaggactgataatggaggctgggcacacgtggtgtgtgccctctacatccccgaggtgcaatttgccaacgtgctcaccatggagcccatcgtgctgcagtacgtgcctcatgatcgcttcaacaagacctgttacatctgcgaggagacgggccgggagagcaaggcggcctcgggagcctgcatgacctgtaaccgccatggatgtcgacaagctttccacgtcacctgtgcccaaatggcaggcttgctgtgtgaggaagaagtgctggaggtggacaacgtcaagtactgcggctactgcaaataccacttcagcaagatgaagacatcccggcacagcagcgggggaggcggaggaggcgctggaggaggaggtggcagcatggggggaggtggcagtggtttcatctctgggaggagaagccggtcagcctcaccatccacgcagcaggagaagcaccccacccaccacgagaggggccagaagaagagtcgaaaggacaaagaacgccttaagcagaagcacaagaagcggcctgagtcgccccccagcatcctcaccccgcccgtggtccccactgctgacaaggtctcctcctcggcttcctcttcctcccaccacgaggccagcacgcaggagacctctgagagcagcagggagtcaaaggggaaaaagtcttccagccatagcctgagtcataaagggaagaaactgagcagtgggaaaggtgtgagcagttttacctccgcctcctcttcttcctcctcctcttcctcctcctctggggggcccttccagcctgcagtctcgtccctgcagagctcccctgacttctctgcattccccaagctggagcagccagaggaggacaagtactccaagcccacagcccccgccccttcagcccctccttctccctcagctcccgagccccccaaggctgacctttttgagcagaaggtggtcttctctggctttgggcccatcatgcgcttctccaccaccacctccagctcaggccgggcccgggcgccctcccctggggactataagtctccccacgtcacggggtctggggcctcggcaggcacccacaaacggatgcccgcactgagtgccacccctgtgcctgctgatgagacccctgagacaggcctgaaggagaagaagcacaaagccagcaagaggagccgccatgggccaggccgtcccaagggcagccggaacaaggagggcactgggggcccagctgccccatccttgcccagtgcccagctggctggctttaccgccactgctgcctcacccttctctggaggttccctggtcagctccggcctgggaggtctgtcctcccgaacctttgggccttctgggagcttgcccagcttgagcctggagtcccccttactaggggcaggcatctacaccagtaataaggaccccatctcccacagtggcgggatgctgcgggctgtctgcagcacccctctctcctccagcctcctggggcccccagggacctcggccctgccccgcctcagccgctccccgttcaccagcaccctcccctcctcttctgcttctatctccaccactcaggtgttttctctggctggctctacctttagcctcccttctacccacatctttggaacccccatgggtgccgttaatcccctcctctcccaagctgagagcagccacacagagccagacctggaggactgcagcttccggtgtcgggggacctcccctcaggagagtctgtcttccatgtcccccatcagcagcctccccgcactcttcgaccagacagcctctgcaccctgtgggggcggccagttagacccggcggccccagggacgactaacatggagcagcttctggagaagcagggcgacggggaggccggcgtcaacatcgtggagatgctgaaggcgctgcacgcgctgcagaaggagaaccagcggctgcaagagcagatcctgagcctgacggccaaaaaggagcggctgcagattctcaacgtgcagctctctgtgcccttccctgccctgcctgctgccctgcctgccgccaacggccctgtccctgggccctatggcctgcctccccaagccgggagcagcgactccttgagcaccagcaagagccctccgggaaagagcagcctcggcctggacaactcgctgtccacttcttctgaggacccacactcaggctgcccgagccgcagcagctcgtcgctgtccttccacagcacgcccccaccgctgcccctcctccagcagagccctgccactctgcccctggccctgcctggggcccctgccccactcccgccccagccgcagaacgggttgggccgggcacccggggcagcggggctgggggccatgcccatggctgaggggctgttgggggggctggcaggcagtgggggcctgcccctcaatgggctccttggggggttgaatggggccgctgcccccaaccccgcaagcttgagccaggctggcggggcccccacgctgcagctgccaggctgtctcaacagccttacagagcagcagagacatctccttcagcagcaagagcagcagctccagcaactccagcagctcctggcctccccgcagctgaccccggaacaccagactgttgtctaccagatgatccagcagatccagcagaaacgggagctgcagcgtctgcagatggctgggggctcccagctgcccatggccagcctgctggcaggaagctccaccccgctgctgtctgcgggtacccctggcctgctgcccacagcgtctgctccacccctgctgcccgctggagccctagtggctccctcgcttggcaacaacacaagtctcatggccgcagcagctgcagctgcagcagtagcagcagcaggcggacctccagtcctcactgcccagaccaaccccttcctcagcctgtcgggagcagagggcagtggcggtggccccaaaggagggaccgctgacaaaggagcctcagccaaccaggaaaaaggctaa

SEQ ID NO: 54 - DNA, 2227 bp, Homo sapiens
gagagcccgaacaggaagagggtacagctttgtgcaggtcacatgcccactgcagccctccagcctctggtccccagagcggactttggaagctgaactgcttttgttgctggaagacttatgttataatttaccctgggtggaccagggtcgtacaaaagggcaacgctccccagtccccccactcccgaccccggaatcatgcatcggactacacggatcaaaatcacagagctgaacccccacctcatgtgtgccctctgcggggggtacttcatcgacgccaccactatcgtggagtgcctgcattccttctgcaaaacctgcatcgtgcgctacctggagaccaacaaatactgccccatgtgtgacgtgcaggtccataaaacccggccgctgctgagcatcaggtctgacaaaacacttcaagacattgtctacaaattggtccctgggctttttaaagatgagatgaaacggcggcgggatttctatgcagcgtaccccctgacggaggtccccaacggctccaatgaggaccgcggcgaggtcttggagcaggagaagggggctctgagtgatgatgagattgtcagcctctccatcgaattctacgaaggtgccagggaccgggatgagaagaagggccccctggagaatggggatggggacaaagagaaaacaggggtgcgcttcctgcgatgcccagcagccatgaccgtcatgcatcttgccaagtttctccgcaacaagatggatgtgcccagcaagtacaaggtggaggttctgtacgaggacgagccactgaaggaatactacaccctcatggacatcgcctacatctacccctggcggcggaacgggcctctccccctcaagtaccgtgtccagccagcctgcaagcggctcaccctagccacggtgcccaccccctccgagggcaccaacaccagcggggcgtccgagtgtgagtcagtcagcgacaaggctcccagccctgccaccctgccagccacctcctcctccctgcccagcccagccaccccatcccatggctctcccagttcccatgggcctccagccacccaccctacctcccccactcccccttcgacagccagtggggccaccacagctgccaacgggggtagcttgaactgcctgcagacaccatcctccaccagcagggggcgcaagatgactgtcaacggcgctcccgtgccccccttaacttgaggccagggaccctctcccttcttccagccaagcctctccactccttccactttttctgggcccttttttccacttcttctactttccccagctcttcccaccttgggggtggggggcgggttttataaataaatatatatatatatgtacataggaaaaaccaaatatacatacttattttctatggaccaaccagattaatttaaatgccacaggaaacaaactttatgtgtgtgtgtatgtgtggaaaatggtgttcattttttttggggggggtcttgtgtaatttgctgtttttgggggtgcctggagatgaactggatgggccactggagtctcaataaagctctgcaccatcctcgctgtttcccaaggcaggtggtgtgttgggggccccttcagacccaaagctttaggcatgattccaactggctgcatataggagtcagttagaattgtttctttctctccccgtttctctccccatcttggctgctgtcctgcctctgaccagtggccgccccccgcgttgttgaatgtccagaaattgctaagaacagtgccttttacaaatgcagtttatccctggttctgaggagcaagtgcagggtggaggtggcacctgcatcacctcctcctcttgcagtggaaactttgtgcaaagaatagatagttctgcctcttttttttttttttcctgtgtgtgtggcctttgcatcatttatcttgtggaaaagaagattcaggccctgagaggtctcagctcttggaggagggctaaggctttagcattgtgaagcgctgcacccccaccaaccttaccctcaccggggaaccctcactagcaggactggtggtggagtctcacctggggcctagagtggaagtgggggtgggttaacctcacacaagcacagatcccagactttgccagaggcaaacagggaattccgccgatactgacgggctccaggagtcgtcgccacactcg

SEQ ID NO: 55 - DNA, 4283 bp, Homo sapiens
ttgcgggaaagagccaaaccctggcgttggggggcccgggcggggagcccctcccgcggtccacagcgacgcctgcccagccctcctccccttccggctccggcacggggccccgaggcgttcggaggccaggcgggtttctgtcaggcccggggaggaggggcgggcggggcggccgctgcctccccgggacgggccgtaccacgcggacggggaggacggggccaggggactgcagggcggctgcaccgcccgggggcggggtgcggagcgggccggcgggctccccggggcggggcgggagggcggggcgtggggcggacggaaccaccggggcggggtgggaggtaacgggacgggcgcgaccatggcgcggtgagggagcgggggtggggatcggtccgggggaggcctgaggccgctggcttgtgcgctgtctccgccgcccccctctttcgccgccgccgccgccgccccgggcatgtcgtccaactgcaccagcaccacggcggtggcggtggcgccgctcagcgccagcaagaccaagaccaagaagaagcatttcgtgtgccagaaagtgaagctattccgggccagcgagccgatcctcagcgtcctgatgtggggggtgaaccacacgatcaatgagctgagcaatgttcctgttcctgtcatgctaatgccagatgacttcaaagcctacagcaagatcaaggtggacaatcatctcttcaataaggagaacctgcccagccgctttaagtttaaggagtattgccccatggtgttccgaaaccttcgggagaggtttggaattgatgatcaggattaccagaattcagtgacgcgcagcgcccccatcaacagtgacagccagggtcggtgtggcacgcgtttcctcaccacctacgaccggcgctttgtcatcaagactgtgtccagcgaggacgtggcggagatgcacaacatcttaaagaaataccaccagtttatagtggagtgtcatggcaacacgcttttgccacagttcctgggcatgtaccgcctgaccgtggatggtgtggaaacctacatggtggttaccaggaacgtgttcagccatcggctcactgtgcatcgcaagtatgacctcaagggttctacggttgccagagaagcgagcgacaaggagaaggccaaggacttgccaacattcaaagacaatgacttcctcaatgaagggcagaagctgcatgtgggagaggagagtaaaaagaacttcctggagaaactgaagcgggacgttgagttcttggcacagctgaagatcatggactacagcctgctggtgggcatccacgacgtggaccgggcagagcaggaggagatggaggtggaggagcgggcagaggacgaggagtgtgagaatgatggggtgggtggcaacctactctgctcctatggcacacctccggacagccctggcaacctcctcagctttcctcggttctttggtcctggggaattcgacccctctgttgacgtctatgccatgaaaagccatgaaagttcccccaagaaggaggtgtatttcatggccatcattgatatcctcacgccatacgatacaaagaagaaagctgcacatgctgccaaaacggtgaaacacggggcaggggccgagatctcgactgtgaaccctgagcagtactccaaacgcttcaacgagtttatgtccaacatcctgacgtagttctcttctaccttcagccagagccagagagctggatatggggtcggggatcgggagttagggagaagggtgtatttgggctagatgggagggtgggagcagagtcgggtttgggagggctttagcaatgagactgcagcctgtgacaccgaaagagactttagctgaagaggagggggatgtgctgtgtgtgcacctgctcacaggatgtaaccccaccttctgcttacccttgattttttctccccatttgacacccaggttaaaaaggggttccctttttggtaccttgtaaccttttaagataccttggggctagagatgacttcgtgggtttatttgggttttgtttctgaaatttcattgctccaggtttgctatttataatcatatttcatcagcctacccaccctccccatctttgctgagctctcagttcccttcaattaaagagatacccagtagacccagcacaagggtccttccagaaccaagtgctatggatgccagattggagaggtcagacacctcgccctgctgcatttgctcttgtctggattaactttgtaatttatggagtattgtgcacaacttcctccacctttcccttggattcaagtgaaaactgttgcattattcctccatcctgtctggaatacaccaggtcaacaccagagatctcagatcagaatcagagatctcagaggggaataagttcatcctcatgggatggtgaggggcaggaaagcggctgggctcttggacacctggttctcagagaaccctgtgatgatcacccaagccccaggctgtcttagcccctggagttcagaagtcctctctgtaaagcctgcctcccactaggtcaagaggaactagagtacctttggatttatcaggaccctcatgtttaaatggttatttccctttgggaaaacttcagaaactgatgtatcaaatgaggccctgtgccctcgatctatttccttcttccttctgacctcctcccaggcactcttacttctagccgaactcttagctctgggcagatctccaagcgcctggagtgctttttagcagagacacctcgttaagctccgggatgaccttgtaggagatctgtctccctgtgcctggagagttacagccagcaaggtgcccccatcttagagtgtggtgtccaaacgtgaggtggcttcctagttacatgaggatgtgatccaggaaatccagtttggaggcttgatgtgggttttgacctggcctcagccttggggctgtttttccttgttgccccgctctagacttttagcagatctgcagcccacaggcttttttggaaggagtggcttcctgcaggtgttccacctgccttcggagcctgccacccaggccctcagaactgagccacaggctgctctggccaggagagaaacagctctgttgttctgcattgggggaggtacattcctgcatcttctcaccccctcaaccaggaactggggatttgggatgagatatggtcagacttgtagataaccccaaagatgtgaagatcgcttgtgaaaccattttgaatgaatagattggtttcctgtggctccctccaaacctggccaagcccagcttccgaagcaggaaccagcactgtctctgtgcctgactcacagcatataggtcaggaaagaatggagacggcattcttggacttcactggggctgctggattggatgggaaaccttctggaagaggcagatgggggtcaaaccactgccttggccccaggaaggggccataggtaggtctgaacaactgccgcaagaccactacatgacttagggaacttgaaaccaactggctcatggagaaaacaaatttgacttgggaaagggattatgtaggaataatgtttggacttgatttccccacgtcataatgaagaatggaagtttggatctgctcctcgtcaggcgcagcatctctgaagcttggaaagctgtcttccagcctccaaacctggccaagcccagcttccgaagcaggaaccagcactgtctctgtgcctgactcacagcatataggtcaggaaagaatggagacggcattcttggacttcactggggctgctggattggatgggaaaccttctggaagaggcagatgggggtcaaaccactgccttggccccaggaaggggccataggtaggtctgaacaactgccgcaagaccactacatgacttagggaacttgaaaccaactggctcatggagaaaacaaatttgacttgggaaagggattatgtaggaataatgtttggacttgatttccccacgtcataatgaagaatggaagtttggatctgctcctcgtcaggcgcagcatctctgaagcttggaaagctgtcttccagcagcctccgtggcctcgggttcctaccggcttctctgcatttggtctgctgatcatgttgccataatgtgtatggaaagtgtaacacattcttactggttaaagacgactaccaggtatctaacttgtttaacattga

SEQ ID NO: 56 - DNA, 6140 bp, Homo sapiens
gcggccgcagcctgagccagggccccctccctcgtcaggaccggggcagcaagcaggccgggggcaggtccgggcacccaccatgcgaggcgagctctggctcctggtgctggtgctcagggaggctgcccgggcgctgagcccccagcccggagcaggtcacgatgagggcccaggctctggatgggctgccaaagggaccgtgcggggctggaaccggagagcccgagagagccctgggcatgtgtcagagccggacaggacccagctgagccaggacctgggtgggggcaccctggccatggacacgctgccagataacaggaccagggtggtggaggacaaccacagctattatgtgtcccgtctctatggccccagcgagccccacagccgggaactgtgggtagatgtggccgaggccaaccggagccaagtgaagatccacacaatactctccaacacccaccggcaggcttcgagagtggtcttgtcctttgatttccctttctacgggcatcctctgcggcagatcaccatagcaactggaggcttcatcttcatgggggacgtgatccatcggatgctcacagctactcagtatgtggcgcccctgatggccaacttcaaccctggctactccgacaactccacagttgtttactttgacaatgggacagtctttgtggttcagtgggaccacgtttatctccaaggctgggaagacaagggcagtttcaccttccaggcagctctgcaccatgacggccgcattgtctttgcctataaagagatccctatgtctgtcccggaaatcagctcctcccagcatcctgtcaaaaccggcctatcggatgccttcatgattctcaatccatccccggatgtgccagaatctcggcgaaggagcatctttgaataccaccgcatagagctggaccccagcaaggtcaccagcatgtcggccgtggagttcaccccattgccgacctgcctgcagcataggagctgtgacgcctgcatgtcctcagacctgaccttcaactgcagctggtgccatgtcctccagagatgctccagtggctttgaccgctatcgccaggagtggatggactatggctgtgcacaggaggcagagggcaggatgtgcgaggacttccaggatgaggaccacgactcagcctcccctgacacttccttcagcccctatgatggagacctcaccactacctcctcctccctcttcatcgacagcctcaccacagaagatgacaccaagttgaatccctatgcaggaggagacggccttcagaacaacctgtcccccaagacaaagggcactcctgtgcacctgggcaccatcgtgggcatcgtgctggcagtcctcctcgtggcggccatcatcctggctggaatttacatcaatggccaccccacatccaatgctgcgctcttcttcatcgagcgtagacctcaccactggccagccatgaagtttcgcagccaccctgaccattccacctatgcggaggtggagccctcgggccatgagaaggagggcttcatggaggctgagcagtgctgagaacaccaagtctcccctttgaagactttgaggccacagaaaagacagttaaagcaaagaagagaagtgacttttcctggcctctcccagcatgccctgggctgagatgagatggtggtttatggctccagagctgctgttcgcttcgtcagcacaccccgaatattgaagagggggccaaaaaacaaccacatggattttttataggaacaacaacctaatctcatcctgttttgatgcaagggttctcttctgtgtcttgtaaccatgaaacagcagaagaactaacataactaactccatttttgtttaaggggcctttacctattcctgcacctaggctaggataactttagagcactgacataaaacgcaaaaacaggaatcatgccgtttgcaaaactaactctgggattaaaggggaagcatgtaaacagctaactgtttttgttaaagatttataggaatgaggaggtttggctattgtcacatgacagactgttagccaaggacaaagaagttctgcaaacctcccctggacccttgctggtgtccagatgtctgcggttgtcagccccttcctttcccccgacctaaacataaaagacaaggcaaagcccgcataattttaagacggttctttaggacattagtccaccatcttcttggtttgctggctctccgaaataaagtccctttccttgctccaactccttgtctctcaacgtattggctatgacgcagcaagcagaatgaatttggactcagttacaggctgtcaatggtctgctctgtagcagtctcagagcctccccgacccactacctggagatagccagatagccagatgccctgctcctggccacctttaaagcccctgcatatgacacaggttaactaaagtcaagattggggctgctgcattccaggttccctagactcacaagctggtccttggccaggtgcagtggctcacgcctgtaatcccagcactttgggaggctgaggcaggcggatcacctgaagtcagaagtttgagaccagcctggccaacataattaaaatgtctctactaaaaatacaaaaaattagctgggtgtggtgacgcttgcctgtatcccagctactcaggaagctgagacacgagaatcacttgaacctgggaggcagaggttgcagtgagctcagatagtgccactgcactccagcctgggtgacagagcgagactccgtctcaaaaaaaaaaaaagaaagcagaacctcatggctatagagttggcattttagccccagcttctgtagctctgaaagcctaaagaaggtattctctccatctgttaaacacagtatagtggctctcagcccttggggcatgttatcatgggagggaagtcaaataagaggagagaaaagaactcaagggggaaactgcatttttaggctttgctctcttaccttgccctttctactcagaaccaataacttctgcatcaaaacatgttacagcctgcatcaagggctttaccccaacctgcagcccagccttccctgggtgagcttgctatgcgcagccacatttaccatgtggggctccctattctgatggcctgttcggtgccgggtttactcactgccctgttctgatgtcagtgcctgtacatacctccaaaggcaggacttgcctgataaatatttttcctcctctgaactggattttataggcattaaagacaagtcgggtggctagagggctccttgagacatacctagcagggaactgcaggtggattctgttgagaggcaaagcacctgagtggttgggacacaggcagctggcatgggagggactttttttgagacagggtctcactgtgtcgcccagggcaaggatgcccaaagacaccaggttggagaggcacctgccaactacttgctttccctggagcctgcatgtgcctgtggggtggggaggcgtaggggtctacggctgcctgagatgggtgtgcacagtgtgtgaagtacctacctccttgccttgctggactgtcagccagtcgcagggccggccacaagacccatgtctccatctggtcatactccatagctaccaagttaacctgctctaaactttggagaactggatctgtccaataaacgcttatttggccaagcctgatggctcgtgcctgtactcccagcactttgggaggctgaggtgggagggttgcttgagcccaggggtttgagaccagcttgggcaacaacaacaaaaatgccaggtgtggtggggtgcacctgtagtcccagctactagggaggctgagccaggaggatcacttgagcccgggaggttgaggctgcagtggggggtcataatcatgccactgtactccagcctgggtgacagagtgagaccctgtctccgaaaaaaaaaaaaaaaaaagaacggaaaaagaaatgcttacattgtcagggatcctgtagacaatcattaactctatgagatgcttggttctatttttttgggagactttgtccaagtgttttggcttaagaaatccataggcctctcttggtgacacatctctagtactttttgtcataaacaaacaggccatctgccgccaaatacatccactccccatgccactgacatcctatgggtcagccaggcttgctttgactgaggccgaggcatctggaactttctctgcctgcaggggctagcagcagaggcttcaccgcatcaccaccccttcctccactcctgacattctttcccttcagggatccaaaatggttggccgagctcccagtgggaaaacgtgtgctagagttggggagtgagatgagtggtgctgtccatggaatcaggccacagcaggaactgccccactggccatttgagacacacacaggtggtaaatgctctgctggtgggctgtgcttccctcattcagagagctctgttacagcccactgtgtcctttagaagcttgaaaggaacccaactctttgctgcactgtcctttttcttcctcaaattcagaccctccttccaccggcacccccctactccaccctcagctcttccttgcctggtttatcaagcagagctgaggccccacgtttccaactctgattgtcacttgcatcttcacaaaggataaaccacggagcaactggaaaaccatcagccaagcgttcggatgagtctggttattggtccacccccgaccagattcccttacacttaactcacttctttctttggcaatgaccctcatgacatgtataaatgggtatgactaagaagaggctgtgatctaacatttatttgctgccattttttactctggggagaagcagccccaactcatcactgggaaagaactccccctgcaaaccagctaaatttgataatttaaaccccctgcccctaaaacttctcacagagctggggagttggtggcaactttccaagtcaaggtcttgcttagaaagtccttcactacatggccaggtgcagtggctcacgcctgtagtcccaggtacttgggagcctgaggcaggaggattgcttgagctcaggagttcaaggctgcagagagctatgatcatcccactgcatttgtttaaaaataaatttttaaaatttgtgtgttttatcaggggtctcctgtacagtgtatctgtgtatgtttgtgtgtgtgtttgtatacagccttgtttaatgttttgagcaataagatatgcacacacaggtattttgttgctaaagagattggacaaggttgtagctgtgctcaggcttcagcttggtttgttaaattgagagataaacaatgacaagagctgccagccaaccacactattcaaaaagcaaagtgttcaccactaaagctaaccattcatctggttgcaggcaaggctaaggctctctctcctctagttcctggaacagactcacagattggcatgaagcactgatcaggggctgcactcagactccctggccaagcaaacctacaccagaagagtcagtgtcacagatatgatgcggccaatctctgtctccaaaaacctacctgaacttaatggtagaattcaaagatctggggactgagggcacccagccttctaaaacacaatgtattcatgtgtttagtgtaaactctctgcatggattctcagtgttaataataaaaggaagcattcttttacaactcctgctgtgtgcaaaagaaagtgcaaaggatttggagtggcattccgaagatcaccacacataccttggttctgatggctgctgaactccgacttcttcgctgagacatgactgtgggaacagcctccagctatctgctcatcagaggtgctttcctcaacctcctgcaccacctccaagagaaacagcctaaaaagaaaccccagctgtttacttatattggtctgtaaatccctggaagtaaaccccatgcatttttatctactgtctgaggacatacaataaatctgagaaagtctatgctgtcaaaaaaaaaaaaaaaaaaaa

SEQ ID NO: 57 - DNA, 2098 bp, Homo sapiens
gcaggagcacgtggagaggccgggtagccacagcggcagctccagcccggcccggcagcgacatggaagatatacaaacaaatgcggaactgaaaagcactcaggagcagtctgtgcccgcagaaagtgcagcggttttgaatgactacagtttaaccaaatctcatgaaatggaaaatgtggacagtggagaaggcccagccaatgaagatgaagacataggagatgattcaatgaaagtgaaagatgaatacagtgaaagagatgagaatgttttaaagtcagaacccatgggaaatgcagaagagcctgaaatcccttacagctattcaagagaatataatgaatatgaaaacattaagttggagagacatgttgtctcattcgatagtagcaggccaaccagtggaaagatgaactgcgatgtgtgtggattatcctgcatcagcttcaatgtcttaatggttcataagcgaagccatactggtgaacgcccattccagtgtaatcagtgtggggcatcttttactcagaaaggtaacctcctccgccacattaaactgcacacaggggaaaaaccttttaagtgtcacctctgcaactatgcatgccaaagaagagatgcgctcacggggcatcttaggacacattctgtggagaaaccctacaaatgtgagttttgtggaaggagttacaagcagagaagttcccttgaggagcacaaggagcgctgccgtacatttcttcagagcactgacccaggggacactgcaagtgcggaggcaagacacatcaaagcagagatgggaagtgaaagagctctcgtactggacagattagcaagcaatgtggcaaaacgaaaaagctcaatgcctcagaaattcattggtgagaagcgccactgctttgatgtcaactataattcaagttacatgtatgagaaagagagtgagctcatacagacccgcatgatggaccaagccatcaataacgccatcagctatcttggcgccgaagccctgtgccccttggtccagacaccgcctgctcccacctcggagatggttccagttatcagcagcatgtatcccatagccctcacccgggctgagatgtcaaacggtgcccctcaagagctggaaaggaaaagcatcctccttccagagaagagcgtgccttctgagagaggcctctctcccaacaatagtggccacgactccacggacactgacagcaaccatgaagaacgccagaatcacatctatcagcaaaatcacatggtcctgtctcgggcccgcaatgggatgccacttctgaaggaggttccccgctcttacgaactcctcaagcccccgcccatctgcccaagagactctgtcaaagtgatcgacaaggaaggggaggtgatggatgtgtatcggtgtgaccactgccgcgtcctcttcctggactatgtgatgttcacgattcacatgggctgccacggcttccgtgaccctttcgagtgtaacatgtgtggagatcgaagccatgatcggtatgaattctcgtctcacatagccagaggagaacacagaagcctgctgaagtgaatatctggtctcagggattgctcctatgtattcagcatcgtttctaaaaacagttgacctcgcctaacagattgctctcaaaacatactcagttccaaacttcttttcataccatttttagctgtgttcacaggggtagccagagaaacactgtcttccttcagaaattattcgcaggtctagcatattattacttttgtgaaacctttgttttcccatcagggacttgaattttatggaatttaaaagccaaaaaggtatttggtcattatcttctacagcagtggaatgagtggtcccggagatgtgctatatgaaacattctttctgagatatatcaaccacacgtggaaaagcctttcagtcatacatgcaaatccacaaagaggaagagctgaccagctgaccttgctgggaagcctcacccttctgcccttcacaggctgaagggttaagatctaatctccctaatctaaatgacagtctaagagtaagtaaaagaacag

SEQ ID NO: 58 - DNA, 2947 bp, Homo sapiens
atgccaattcctcctcccccgccacccccacctggtcctcctccacctcccacatttcatcaggcaaacacagagcagcccaagctgagtagagatgagcagcggggtcgaggcgccctcttacaggacatttgcaaagggaccaagctgaagaaggtgaccaacattaatgatcggagtgctcccatcctcgagaagccgaaaggaagcagtggtggctatggctctggaggagctgccctgcagcccaagggaggtctcttccaaggaggagtgctgaagcttcgacctgtgggagccaaggatggttcagagaacctagctggtaagccagccctgcaaatccccagttctcgagctgctgccccaaggcctccagtatctgccgccagcgggcgtcctcaggatgatacagacagcagccgggcctcactcccagaactgccccggatgcagagaccctctttaccggacctctctcggcctaataccaccagcagtacgggcatgaagcacagctcctctgcccctcccccaccacccccagggcggcgtgccaacgcaccccccacacctctgcctatgcacagcagcaaagcccccgcctacaacagagagaaacccttgccaccgacgcctggacaaaggcttcaccctggtcgagagggacctcctgctccacccccagtcaaaccacctccttcccctgtgaatatcagaacaggaccaagtggccagtctctggctcctcctcctccgccttaccgccagcctcctggggtccccaatggaccctctagccccactaatgagtcagcccctgagctgccacagagacacaattctttgcataggaagacaccagggcctgtcagaggcctagcacctcctccacccacctcggcctccccatctttactgagtaataggccacctcccccagcccgagaccctcccagtcggggagcagctcctccacccccaccacctgtgatccgaaatggtgccagggatgctccccctcccccaccaccataccgaatgcatgggtcagaacccccgagccgaggaaagcccccacctccaccctcaaggacgccagctgggccaccccctcctcctccaccgcccctgaggaatggccacagagattctatcaccactgtccggtctttcttggatgattttgagtcaaagtattccttccatccagtagaagactttcctgctccagaagaatataaacactttcagaggatatatcccagcaaaacaaaccgagctgcccgtggagccccacctctgccacccattctcaggtgaagcctggcttggtcccgttcctcaggaaaaggatggaccttctcttcttctcagatggtcccttccattcccctgaaacctgcatgagagctcctaacatgtttctccaatgcaatcaagccctagactccaaatgtcctcccagctcacctccatctatgcatctcatctctggatttggtgatcagactctatattgacagtaggatctcaaaccctgcatccatccttcctccagcaagccctgctagccacatgaggaacaagtttccgtgtcttctgccttcctcttggggaaaggtgccttgttgtgatgaattaactcactgttagggcagggtggagaatggtactccttccttctcctgtccactgtgggggaagcttggcaggtatattatatttcatcatttaggaggctggcatgaccaggacttatgggtgggaggggagcatttttagtgaagcaagaaaggagtttgccaagaagtgatctgttttaaaggtcatatttggagaaagggcaaggaattgggtctgctttatttttgggggtattttgtttttgttctcacctgctgcccccccaccccaccaccccagggataaattggatataaacactaaatactaatcagttgaacttaacatttaataaaaagaaagggtgaaataaactgaagaccattttagaactagtcagttctctgcagcaaagggaacaggagccatttgaaccctctgggacccctcaccccactgcttcagggtgctaggctgagggatgtttttcctcccccttaccgcccatgcccttgaaagaaaagtcactttttgtggagggcatcattcattcctgattcacaaaccccaaaaacctctggtgggagataggaagatagggcgtgggcctgggccttaacctcaatcttgtgtctgcctcagtcttttctgactggccctgaagttgtcagtggctctttctgtccttcagcccctggaaggtgctccaggataacaaagaagggcaggttgaagcccctcatggaaggagctggctttgtggggctgcaaaggacttttaagtcctgcctgtactgaagttcacagcccacctgactgagcagactcttcctgttcctttctctaccacccttgccttcccaggactgcacggtttaacacagcagagtacagaagggtgaagaagtgagcagaggcttatgaagatattcagatactcttctatgccaggaagcacaaagactttgttgagatttgcctcagttcagtagatcttccttggcagccagccataggttgtttctttgtcttccgggtcctaaagagcacagagaaaatggaggtccccagtctaggtaggaagctgattggatgaggacttctttttttccgacagcaggatggggctcttgggctccacacaccagatgctttggttttctacaactgttgctatgtgtagagggtgctcagagcgtggcatgagagcaaggagaccatggctactctttgaaatggatggggaaaattagcttaaaaatttaatcacgagattgcgccactgcactccagcctgggcgacagagccagactccgtctc

SEQ ID NO: 59 - DNA, 784 bp, Homo sapiens
gagcggttgcgcagtgaaggctagacccggtttactggaattgctctggcgatcgaggggtcctagtacaccgcaatcatgtctattatgtcctataacggaggggccgtcatggccatgaaggggaagaactgtgtggccatcgctgcagacaggcgcttcgggatccaggcccagatggtgaccacggacttccagaagatctttcccatgggtgaccggctgtacatcggtctggccgggctcgccactgacgtccagacagttgcccagcgcctcaagttccggctgaacctgtatgagttgaaggaaggtcggcagatcaaaccttataccctcatgagcatggtggccaacctcttgtatgagaaacggtttggcccttactacactgagccagtcattgccgggttggacccgaagacctttaagcccttcatttgctctctagacctcatcggctgccccatggtgactgatgactttgtggtcagtggcacctgcgccgaacaaatgtacggaatgtgtgagtccctctgggagcccaacatggatccggatcacctgtttgaaaccatctcccaagccatgctgaatgctgtggaccgggatgcagtgtcaggcatgggagtcattgtccacatcatcgagaaggacaaaatcaccaccaggacactgaaggcccgaatggactaaccctgttcccagagcccacttttttttctttttttgaaataaaatagcctgtctttcaaaaaaaaaaaaaaaaaaaaaaaaaaaaaaa

SEQ ID NO: 60 - DNA, 3033 bp, Homo sapiens
atactcctaagctcctcccccggcggcgagccagggagaaaggatggccggcctggcggcgcggttggtcctgctagctggggcagcggcgctggcgagcggctcccagggcgaccgtgagccggtgtaccgcgactgcgtactgcagtgcgaagagcagaactgctctgggggcgctctgaatcacttccgctcccgccagccaatctacatgagtctagcaggctggacctgtcgggacgactgtaagtatgagtgtatgtgggtcaccgttgggctctacctccaggaaggtcacaaagtgcctcagttccatggcaagtggcccttctcccggttcctgttctttcaagagccggcatcggccgtggcctcgtttctcaatggcctggccagcctggtgatgctctgccgctaccgcaccttcgtgccagcctcctcccccatgtaccacacctgtgtggccttcgcctgggtgtccctcaatgcatggttctggtccacagtcttccacaccagggacactgacctcacagagaaaatggactacttctgtgcctccactgtcatcctacactcaatctacctgtgctgcgtcaggtgagcctgcctgggtggctgcaggggcaaaatcgaaccctgggggcagaaaggggtcacccagccttcccctgggggccttcttcactagtctcccaacacctacgccccccaacccccaacacatcagctgtcctgggtgaggactctggggtaggactgggggccctggctcctgacaaggagctgtagcacttgctgcccagctgtggcctgtttggtggggagaggggtagtgacttcaggggccatgcaccaatgttggggggaggagatgcttcagggaatgctgctctggggatgggccacctgccctctgagcaaccctggacggtggggcaggaccgtggggctgcagcacccagctgtggtcagtgccttccgggctctcctgctgctcatgctgaccgtgcacgtctcctacctgagcctcatccgcttcgactatggctacaacctggtggccaacgtggctattggcctggtcaacgtggtgtggtggctggcctggtgcctgtggaaccagcggcggctgcctcacgtgcgcaagtgcgtggtggtggtcttgctgctgcaggggctgtccctgctcgagctgcttgacttcccaccgctcttctgggtcctggatgcccatgccatctggcacatcagcaccatccctgtccacgtcctctttttcagctttctggaagatgacagcctgtacctgctgaaggaatcagaggacaagttcaagctggactgaagaccttggagcgagtctgccccagtggggatcctgcccccgccctgctggcctcccttctcccctcaacccttgagatgattttctcttttcaacttcttgaacttggacatgaaggatgtgggcccagaatcatgtggccagcccaccccctgttggccctcaccagccttggagtctgttctagggaaggcctcccagcatctgggactcgagagtgggcagcccctctacctcctggagctgaactggggtggaactgagtgtgttcttagctctaccgggaggacagctgcctgtttcctccccaccagcctcctccccacatccccagctgcctggctgggtcctgaagccctctgtctacctgggagaccagggaccacaggccttagggatacagggggtccccttctgttaccaccccccaccctcctccaggacaccactaggtggtgctggatgcttgttctttggccagccaaggttcacggcgattctccccatgggatcttgagggaccaagctgctgggattgggaaggagtttcaccctgaccgttgccctagccaggttcccaggaggcctcaccatactccctttcagggccagggctccagcaagcccagggcaaggatcctgtgctgctgtctggttgagagcctgccaccgtgtgtcgggagtgtgggccaggctgagtgcataggtgacagggccgtgagcatgggcctgggtgtgtgtgagctcaggcctaggtgcgcagtgtggagacgggtgttgtcggggaagaggtgtggcttcaaagtgtgtgtgtgcagggggtgggtgtgttagcgtgggttaggggaacgtgtgtgcgcgtgctggtgggcatgtgagatgagtgactgccggtgaatgtgtccacagttgagaggttggagcaggatgagggaatcctgtcaccatcaataatcacttgtggagcgccagctctgcccaagacgccacctgggcggacagccaggagctctccatggccaggctgcctgtgtgcatgttccctgtctggtgcccctttgcccgcctcctgcaaacctcacagggtccccacacaacagtgccctccagaagcagcccctcggaggcagaggaaggaaaatggggatggctggggctctctccatcctccttttctccttgccttcgcatggctggccttcccctccaaaacctccattcccctgctgccagcccctttgccatagcctgattttggggaggaggaaggggcgatttgagggagaaggggagaaagcttatggctgggtctggtttcttcccttcccagagggtcttactgttccagggtggccccagggcaggcaggggccacactatgcctgcgccctggtaaaggtgacccctgccatttaccagcagccctggcatgttcctgccccacaggaatagaatggagggagctccagaaactttccatcccaaaggcagtctccgtggttgaagcagactggatttttgctctgcccctgaccccttgtccctctttgagggaggggagctatgctaggactccaacctcagggactcgggtggcctgcgctagcttcttttgatactgaaaacttttaaggtgggagggtggcaagggatgtgcttaataaatcaattccaagcctcacctg

SEQ ID NO: 61 - DNA, 1174 bp, Homo sapiens
aagctcctcccccggcggcgagccagggagaaaggatggccggcctggcggcgcggttggtcctgctagctggggcagcggcgctggcgagcggctcccagggcgaccgtgagccggtgtaccgcgactgcgtactgcagtgcgaagagcagaactgctctgggggcgctctgaatcacttccgctcccgccagccaatctacatgagtctagcaggctggacctgtcgggacgactgtaagtatgagtgtatgtgggtcaccgttgggctctacctccaggaaggtcacaaagtgcctcagttccatggcaagtggcccttctcccggttcctgttctttcaagagccggcatcggccgtggcctcgtttctcaatggcctggccagcctggtgatgctctgccgctaccgcaccttcgtgccagcctcctcccccatgtaccacacctgtgtggccttcgcctgggtgtccctcaatgcatggttctggtccacagtcttccacaccagggacactgacctcacagagaaaatggactacttctgtgcctccactgtcatcctacactcaatctacctgtgctgcgtcaggaccgtggggctgcagcacccagctgtggtcagtgccttccgggctctcctgctgctcatgctgaccgtgcacgtctcctacctgagcctcatccgcttcgactatggctacaacctggtggccaacgtggctattggcctggtcaacgtggtgtggtggctggcctggtgcctgtggaaccagcggcggctgcctcacgtgcgcaagtgcgtggtggtggtcttgctgctgcaggggctgtccctgctcgagctgcttgacttcccaccgctcttctgggtcctggatgcccatgccatctggcacatcagcaccatccctgtccacgtcctctttttcagctttctggaagatgacagcctgtacctgctgaaggaatcagaggacaagttcaagctggttgaagcagactggatttttgctctgcccctgaccccttgtccctctttgagggaggggagctatgctaggactccaacctcagggactcgggtggcctgcgctagcttcttttgatactgaaaacttttaaggtgggagggtggcaagggatgtgcttaataaatcaattccaagcctca

SEQ ID NO: 62 - DNA, 3167 bp, Homo sapiens
aagctcctcccccggcggcgagccagggagaaaggatggccggcctggcggcgcggttggtcctgctagctggggcagcggcgctggcgagcggctcccagggcgaccgtgagccggtgtaccgcgactgcgtactgcagtgcgaagagcagaactgctctgggggcgctctgaatcacttccgctcccgccagccaatctacatgagtctagcaggctggacctgtcgggacgactgtaagtatgagtgtatgtgggtcaccgttgggctctacctccaggaaggtcacaaagtgcctcagttccatggcaagtggcccttctcccggttcctgttctttcaagagccggcatcggccgtggcctcgtttctcaatggcctggccagcctggtgatgctctgccgctaccgcaccttcgtgccagcctcctcccccatgtaccacacctgtgtggccttcgcctggatgagaaaactgaggcacagcaaggctaaataacttgcccaaggacacacaggaaatgcagagccaggaactgaaccctggcagtctggctgtagggcttgcattcttaatgataccactacctcccaaatctgaggaaagggtgtccctcaatgcatggttctggtccacagtcttccacaccagggacactgacctcacagagaaaatggactacttctgtgcctccactgtcatcctacactcaatctacctgtgctgcgtcaggtgagcctgcctgggtggctgcaggggcaaaatcgaaccctgggggcagaaaggggtcacccagccttcccctgggggccttcttcactagtctcccaacacctacgccccccaacccccaacacatcagctgtcctgggtgaggactctggggtaggactgggggccctggctcctgacaaggagctgtagcacttgctgcccagctgtggcctgtttggtggggagaggggtagtgacttcaggggccatgcaccaatgttggggggaggagatgcttcagggaatgctgctctggggatgggccacctgccctctgagcaaccctggacggtggggcaggaccgtggggctgcagcacccagctgtggtcagtgccttccgggctctcctgctgctcatgctgaccgtgcacgtctcctacctgagcctcatccgcttcgactatggctacaacctggtggccaacgtggctattggcctggtcaacgtggtgtggtggctggcctggtgcctgtggaaccagcggcggctgcctcacgtgcgcaagtgcgtggtggtggtcttgctgctgcaggggctgtccctgctcgagctgcttgacttcccaccgctcttctgggtcctggatgcccatgccatctggcacatcagcaccatccctgtccacgtcctctttttcagctttctggaagatgacagcctgtacctgctgaaggaatcagaggacaagttcaagctggactgaagaccttggagcgagtctgccccagtggggatcctgcccccgccctgctggcctcccttctcccctcaacccttgagatgattttctcttttcaacttcttgaacttggacatgaaggatgtgggcccagaatcatgtggccagcccaccccctgttggccctcaccagccttggagtctgttctagggaaggcctcccagcatctgggactcgagagtgggcagcccctctacctcctggagctgaactggggtggaactgagtgtgttcttagctctaccgggaggacagctgcctgtttcctccccaccagcctcctccccacatccccagctgcctggctgggtcctgaagccctctgtctacctgggagaccagggaccacaggccttagggatacagggggtccccttctgttaccaccccccaccctcctccaggacaccactaggtggtgctggatgcttgttctttggccagccaaggttcacggcgattctccccatgggatcttgagggaccaagctgctgggattgggaaggagtttcaccctgaccgttgccctagccaggttcccaggaggcctcaccatactccctttcagggccagggctccagcaagcccagggcaaggatcctgtgctgctgtctggttgagagcctgccaccgtgtgtcgggagtgtgggccaggctgagtgcataggtgacagggccgtgagcatgggcctgggtgtgtgtgagctcaggcctaggtgcgcagtgtggagacgggtgttgtcggggaagaggtgtggcttcaaagtgtgtgtgtgcagggggtgggtgtgttagcgtgggttaggggaacgtgtgtgcgcgtgctggtgggcatgtgagatgagtgactgccggtgaatgtgtccacagttgagaggttggagcaggatgagggaatcctgtcaccatcaataatcacttgtggagcgccagctctgcccaagacgccacctgggcggacagccaggagctctccatggccaggctgcctgtgtgcatgttccctgtctggtgcccctttgcccgcctcctgcaaacctcacagggtccccacacaacagtgccctccagaagcagcccctcggaggcagaggaaggaaaatggggatggctggggctctctccatcctccttttctccttgccttcgcatggctggccttcccctccaaaacctccattcccctgctgccagcccctttgccatagcctgattttggggaggaggaaggggcgatttgagggagaaggggagaaagcttatggctgggtctggtttcttcccttcccagagggtcttactgttccagggtggccccagggcaggcaggggccacactatgcctgcgccctggtaaaggtgacccctgccatttaccagcagccctggcatgttcctgccccacaggaatagaatggagggagctccagaaactttccatcccaaaggcagtctccgtggttgaagcagactggatttttgctctgcccctgaccccttgtccctctttgagggaggggagctatgctaggactccaacctcagggactcgggtggcctgcgctagcttcttttgatactgaaaacttttaaggtgggagggtggcaagggatgtgcttaataaatcaattccaagcctcacctg

SEQ ID NO: 63 - DNA, 2733 bp, Homo sapiens
  misc_feature (2694)..(2694): n=a, c, g or t
  misc_feature (2724)..(2724): n=a, c, g or t
agggagaaaggatggccggcctggcggcgcggttggtcctgctagctggggcagcggcgctggcgagcggctcccagggcgaccgtgagccggtgtaccgcgactgcgtactgcagtgcgaagagcagaactgctctgggggcgctctgaatcacttccgctcccgccagccaatctacatgagtctagcaggctggacctgtcgggacgactgtaagtatgagtgtatgtgggtcaccgttgggctctacctccaggaaggtcacaaagtgcctcagttccatggcaagtggcccttctcccggttcctgttctttcaagagccggcatcggccgtggcctcgtttctcaatggcctggccagcctggtgatgctctgccgctaccgcaccttcgtgccagcctcctcccccatgtaccacacctgtgtggccttcgcctgggtgtccctcaatgcatggttctggtccacagtcttccacaccagggacactgacctacagagaaaatggactacttctgtgcctcctgtatcctacactcaatctacctgtgctgcgtcaggaccgtggggctgcagcacccagctgtggtcaagtgccttccgggctctcctgctgctcatgctgaccgtgcacgtctcctacctgagcctcatccgcttcgactatggctacaacctggtggccaacgtggctattggcctggtcaacgtggtgtggtggctggcctggtgcctgtggaaccagcggcggctgcctcacgtgcgcaagtgcgtggtggtggtcttgctgctgcaggggctgtccctgctcgagctgcttgacttcccaccgctcttctgggtcctggatgcccatgccatctggcacatcagcaccatccctgtccacgtcctctttttcagctttctggaagatgacagcctgtacctgctgaaggaatcagaggacaagttcaagctggactgagaccttggagcgaagtctgccccagtggggatcctgcccccgccctgctggcctcccttctcccctcaacccttgagatgattttctcttttcaacttcttgaacttggacatgaaggatgtgggcccagaatcatgtggccagcccaccccctgttggccctcaccagccttggagtctgttctagggaaggcctcccagcatctgggactcgagagtgggcagcccctctacctcctggactgaactggggtggaactgagtgtgttcttagctctaccgggaggacagctgcctgtttcctccccaccagcctcctccccacatccccagctgcctggctgggtcctgaagccctctgtctacctgggagaccagggtaccacaggccttagggatacagggggtccccttctgttaccaccccccaccctcctccaggacaccactaggtggtgctggatgcttgttctttggccagccaaggttcacggcgattctccccatgggatcttgagggaccaagctgctgggattgggaaggagtttcaccctgaccgttgccctagccaggttcccaggaggcctcaccatactccctttcagggccagggctccagcaagcccagggcaaggatcctgtgctgctgtctggttgagagcctgccaccgtgtgtcgggagtgtgggccaggctgagtgcataggtgacagggccgtgagcatgggcctgggtgtgtgtgagctcaggcctaggtgcgcagtgtggagacgggtgttgtcggggaagaggtgtggcttcaaagtgtgtgtgtgcagggggtgggtgtgttagcgtgggttaggggaacgtgtgtgcgcgtgctggtgggcatgtgagatgagtgactgccggtgaatgtgtccacagttgagaggttggagcaggatgagggaatcctgtcaccatcaataatcacttgtggagcgccagctctgcccaagacgccacctgggcggacagccaggagctctccatggccaggctgcctgtgtgcatgttccctgtctggtgcccctttgcccgcctcctgcaaacctcacagggtccccacacaacagtgccctccagaagcagcccctcggaggcagaggaaggaaaatggggatggctggggctctctccatcctccttttctccttgccttcgcatggctggccttcccctccaaaacctccattcccctgctgccagcccctttgccatagcctgattttggggaggaggaaggggcgatttgagggagaaggggagaaagcttatggctgggtctggtttcttcccttcccagagggtcttactgttccagggtggccccaggcagcagggccacactatgcctgcgccctggtaaaggtgacccctgccatttaccagcagccctggcatgttcctgccccacaggaatagaatggagggagctccagaaactttccatcccaaaggcagtctccgtggttgaagcagactggatttttgctctgcccctgaccccttgtccctctttgagggaggggagctatgctaggactccaacctcagggactcgggtggcctgcgctagcttcttttgatactgaaaacttttaaggtgggagggtggcaagggatgtgcttaagcggccgcgaattcaaaaagcttctcgagagtacttctagagcggccgcgggcccatcgattttnccacccgggtggggtacccaggtaagtgtnccccatatc

SEQ ID NO: 64 - DNA, 2546 bp, Homo sapiens
aagctcctcccccggcggcgagccagggagaaaggatggccggcctggcggcgcggttggtcctgctagctggggcagcggcgctggcgagcggctcccagggcgaccgtgagccggtgtaccgcgactgcgtactgcagtgcgaagagcagaactgctctgggggcgctctgaatcacttccgctcccgccagccaatctacatgagtctagcaggctggacctgtcgggacgactgtaagtatgagtgtatgtgggtcaccgttgggctctacctccaggaaggtcacaaagtgcctcagttccatggcaagtggcccttctcccggttcctgttctttcaagagccggcatcggccgtggcctcgtttctcaatggcctggccagcctggtgatgctctgccgctaccgcaccttcgtgccagcctcctcccccatgtaccacacctgtgtggccttcgcctgggtgtccctcaatgcatggttctggtccacagtcttccacaccagggacactgacctcacagagaaaatggactacttctgtgcctccactgtcatcctacactcaatctacctgtgctgcgtcaggcctggtcaacgtggtgtggtggctggcctggtgcctgtggaaccagcggcggctgcctcacgtgcgcaagtgcgtggtggtggtcttgctgctgcaggggctgtccctgctcgagctgcttgacttcccaccgctcttctgggtcctggatgcccatgccatctggcacatcagcaccatccctgtccacgtcctctttttcagctttctggaagatgacagcctgtacctgctgaaggaatcagaggacaagttcaagctggactgaagaccttggagcgagtctgccccagtggggatcctgcccccgccctgctggcctcccttctcccctcaacccttgagatgattttctcttttcaacttcttgaacttggacatgaaggatgtgggcccagaatcatgtggccagcccaccccctgttggccctcaccagccttggagtctgttctagggaaggcctcccagcatctgggactcgagagtgggcagcccctctacctcctggagctgaactggggtggaactgagtgtgttcttagctctaccgggaggacagctgcctgtttcctccccaccagcctcctccccacatccccagctgcctggctgggtcctgaagccctctgtctacctgggagaccagggaccacaggccttagggatacagggggtccccttctgttaccaccccccaccctcctccaggacaccactaggtggtgctggatgcttgttctttggccagccaaggttcacggcgattctccccatgggatcttgagggaccaagctgctgggattgggaaggagtttcaccctgaccgttgccctagccaggttcccaggaggcctcaccatactccctttcagggccagggctccagcaagcccagggcaaggatcctgtgctgctgtctggttgagagcctgccaccgtgtgtcgggagtgtgggccaggctgagtgcataggtgacagggccgtgagcatgggcctgggtgtgtgtgagctcaggcctaggtgcgcagtgtggagacgggtgttgtcggggaagaggtgtggcttcaaagtgtgtgtgtgcagggggtgggtgtgttagcgtgggttaggggaacgtgtgtgcgcgtgctggtgggcatgtgagatgagtgactgccggtgaatgtgtccacagttgagaggttggagcaggatgagggaatcctgtcaccatcaataatcacttgtggagcgccagctctgcccaagacgccacctgggcggacagccaggagctctccatggccaggctgcctgtgtgcatgttccctgtctggtgcccctttgcccgcctcctgcaaacctcacagggtccccacacaacagtgccctccagaagcagcccctcggaggcagaggaaggaaaatggggatggctggggctctctccatcctccttttctccttgccttcgcatggctggccttcccctccaaaacctccattcccctgctgccagcccctttgccatagcctgattttggggaggaggaaggggcgatttgagggagaaggggagaaagcttatggctgggtctggtttcttcccttcccagagggtcttactgttccagggtggccccagggcaggcaggggccacactatgcctgcgccctggtaaaggtgacccctgccatttaccagcagccctggcatgttcctgccccacaggaatagaatggagggagctccagaaactttccatcccaaaggcagtctccgtggttgaagcagactggatttttgctctgcccctgaccccttgtccctctttgagggaggggagctatgctaggactccaacctcagggactcgggtggcctgcgctagcttcttttgatactgaaaacttttaaggtgggagggtggcaagggatgtgcttaataaatcaattccaagcctcacctg

SEQ ID NO: 65 - DNA, 2683 bp, Homo sapiens
aagctcctcccccggcggcgagccagggagaaaggatggccggcctggcggcgcggttggtcctgctagctggggcagcggcgctggcgagcggctcccagggcgaccgtgagccggtgtaccgcgactgcgtactgcagtgcgaagagcagaactgctctgggggcgctctgaatcacttccgctcccgccagccaatctacatgagtctagcaggctggacctgtcgggacgactgtaagtatgagtgtatgtgggtcaccgttgggctctacctccaggaaggtcacaaagtgcctcagttccatggcaagtggcccttctcccggttcctgttctttcaagagccggcatcggccgtggcctcgtttctcaatggcctggccagcctggtgatgctctgccgctaccgcaccttcgtgccagcctcctcccccatgtaccacacctgtgtggccttcgcctgggtgtccctcaatgcatggttctggtccacagtcttccacaccagggacactgacctcacagagaaaatggactacttctgtgcctccactgtcatcctacactcaatctacctgtgctgcgtcaggaccgtggggctgcagcacccagctgtggtcagtgccttccgggctctcctgctgctcatgctgaccgtgcacgtctcctacctgagcctcatccgcttcgactatggctacaacctggtggccaacgtggctattggcctggtcaacgtggtgtggtggctggcctggtgcctgtggaaccagcggcggctgcctcacgtgcgcaagtgcgtggtggtggtcttgctgctgcaggggctgtccctgctcgagctgcttgacttcccaccgctcttctgggtcctggatgcccatgccatctggcacatcagcaccatccctgtccacgtcctctttttcagctttctggaagatgacagcctgtacctgctgaaggaatcagaggacaagttcaagctggactgaagaccttggagcgagtctgccccagtggggatcctgcccccgccctgctggcctcccttctcccctcaacccttgagatgattttctcttttcaacttcttgaacttggacatgaaggatgtgggcccagaatcatgtggccagcccaccccctgttggccctcaccagccttggagtctgttctagggaaggcctcccagcatctgggactcgagagtgggcagcccctctacctcctggagctgaactggggtggaactgagtgtgttcttagctctaccgggaggacagctgcctgtttcctccccaccagcctcctccccacatccccagctgcctggctgggtcctgaagccctctgtctacctgggagaccagggaccacaggccttagggatacagggggtccccttctgttaccaccccccaccctcctccaggacaccactaggtggtgctggatgcttgttctttggccagccaaggttcacggcgattctccccatgggatcttgagggaccaagctgctgggattgggaaggagtttcaccctgaccgttgccctagccaggttcccaggaggcctcaccatactccctttcagggccagggctccagcaagcccagggcaaggatcctgtgctgctgtctggttgagagcctgccaccgtgtgtcgggagtgtgggccaggctgagtgcataggtgacagggccgtgagcatgggcctgggtgtgtgtgagctcaggcctaggtgcgcagtgtggagacgggtgttgtcggggaagaggtgtggcttcaaagtgtgtgtgtgcagggggtgggtgtgttagcgtgggttaggggaacgtgtgtgcgcgtgctggtgggcatgtgagatgagtgactgccggtgaatgtgtccacagttgagaggttggagcaggatgagggaatcctgtcaccatcaataatcacttgtggagcgccagctctgcccaagacgccacctgggcggacagccaggagctctccatggccaggctgcctgtgtgcatgttccctgtctggtgcccctttgcccgcctcctgcaaacctcacagggtccccacacaacagtgccctccagaagcagcccctcggaggcagaggaaggaaaatggggatggctggggctctctccatcctccttttctccttgccttcgcatggctggccttcccctccaaaacctccattcccctgctgccagcccctttgccatagcctgattttggggaggaggaaggggcgatttgagggagaaggggagaaagcttatggctgggtctggtttcttcccttcccagagggtcttactgttccagggtggccccagggcaggcaggggccacactatgcctgcgccctggtaaaggtgacccctgccatttaccagcagccctggcatgttcctgccccacaggaatagaatggagggagctccagaaactttccatcccaaaggcagtctccgtggttgaagcagactggatttttgctctgcccctgaccccttgtccctctttgagggaggggagctatgctaggactccaacctcagggactcgggtggcctgcgctagcttcttttgatactgaaaacttttaaggtgggagggtggcaagggatgtgcttaataaatcaattccaagcctcacctg

SEQ ID NO: 66 - DNA, 2341 bp, Homo sapiens
aagctcctcccccggcggcgagccagggagaaaggatggccggcctggcggcgcggttggtcctgctagctggggcagcggcgctggcgagcggctcccagggcgaccgtgagccggtgtaccgcgactgcgtactgcagtgcgaagagcagaactgctctgggggcgctctgaatcacttccgctcccgccagccaatctacatgagtctagcaggctggacctgtcgggacgactgtaagtatgagtgtatgtgggtcaccgttgggctctacctccaggaaggtcacaaagtgcctcagttccatggcaagtggcccttctcccggttcctgttctttcaagagccggcatcggccgtggcctcgtttctcaatggcctggccagcctggtgatgctctgccgctaccgcaccttcgtgccagcctcctcccccatgtaccacacctgtgtggccttcgcctgggtgtccctcaatgcatggttctggtccacagtcttccacaccagggacactgacctcacagagaaaatggactacttctgtgcctccactgtcatcctacactcaatctacctgtgctgcgtcagctttctggaagatgacagcctgtacctgctgaaggaatcagaggacaagttcaagctggactgaagaccttggagcgagtctgccccagtggggatcctgcccccgccctgctggcctcccttctcccctcaacccttgagatgattttctcttttcaacttcttgaacttggacatgaaggatgtgggcccagaatcatgtggccagcccaccccctgttggccctcaccagccttggagtctgttctagggaaggcctcccagcatctgggactcgagagtgggcagcccctctacctcctggagctgaactggggtggaactgagtgtgttcttagctctaccgggaggacagctgcctgtttcctccccaccagcctcctccccacatccccagctgcctggctgggtcctgaagccctctgtctacctgggagaccagggaccacaggccttagggatacagggggtccccttctgttaccaccccccaccctcctccaggacaccactaggtggtgctggatgcttgttctttggccagccaaggttcacggcgattctccccatgggatcttgagggaccaagctgctgggattgggaaggagtttcaccctgaccgttgccctagccaggttcccaggaggcctcaccatactccctttcagggccagggctccagcaagcccagggcaaggatcctgtgctgctgtctggttgagagcctgccaccgtgtgtcgggagtgtgggccaggctgagtgcataggtgacagggccgtgagcatgggcctgggtgtgtgtgagctcaggcctaggtgcgcagtgtggagacgggtgttgtcggggaagaggtgtggcttcaaagtgtgtgtgtgcagggggtgggtgtgttagcgtgggttaggggaacgtgtgtgcgcgtgctggtgggcatgtgagatgagtgactgccggtgaatgtgtccacagttgagaggttggagcaggatgagggaatcctgtcaccatcaataatcacttgtggagcgccagctctgcccaagacgccacctgggcggacagccaggagctctccatggccaggctgcctgtgtgcatgttccctgtctggtgcccctttgcccgcctcctgcaaacctcacagggtccccacacaacagtgccctccagaagcagcccctcggaggcagaggaaggaaaatggggatggctggggctctctccatcctccttttctccttgccttcgcatggctggccttcccctccaaaacctccattcccctgctgccagcccctttgccatagcctgattttggggaggaggaaggggcgatttgagggagaaggggagaaagcttatggctgggtctggtttcttcccttcccagagggtcttactgttccagggtggccccagggcaggcaggggccacactatgcctgcgccctggtaaaggtgacccctgccatttaccagcagccctggcatgttcctgccccacaggaatagaatggagggagctccagaaactttccatcccaaaggcagtctccgtggttgaagcagactggatttttgctctgcccctgaccccttgtccctctttgagggaggggagctatgctaggactccaacctcagggactcgggtggcctgcgctagcttcttttgatactgaaaacttttaaggtgggagggtggcaagggatgtgcttaataaatcaattccaagcctcacctg

SEQ ID NO: 67 - DNA, 2109 bp, Homo sapiens
gattcggccggagctgccagcggggaggctgcagccgcgggttgttacagctgctggagcagcagcggcccccgctcccgggaaccgttcccgggccgttgatcttcggccccacacgaacagcagagaggggcagcaggatgaatgtgggcacagcgcacagcgaggtgaaccccaacacgcgggtgatgaacagccgtggcatctggctctcctacgtgctggccatcggtctcctccacatcgtgctgctgagcatcccgtttgtgagtgtccctgtcgtctggaccctcaccaacctcattcacaacatgggcatgtatatcttcctgcacacggtgaaggggacaccctttgagaccccggaccagggcaaggcgaggctgctaacccactgggagcagatggattatggggtccagttcacggcctctcggaagttcttgaccatcacacccatcgtgctgtacttcctcaccagcttctacactaagtacgaccagatccattttgtgctcaacaccgtgtccctgatgagcgtgcttatccccaagctgccccagctccacggagtccggatttttggaatcaataagtactgagagtgcagccccttcccctgcccagggtggcaggggaggggtagggtaaaaggcatgtgctgcaacactgaagacagaaagaagaagcctctggacactgccagagatgggggttgagcctctggcctaatttcccccctcgcttcccccagtagccaacttggagtagcttgtagtggggttggggtaggccccctgggctctgaccttttctgaattttttgatctcttccttttgctttttgaatagagactccatggagttggtcatggaatgggctgggctcctgggctgaacatggaccacgcagttgcgacaggaggccaggggaaaaacccctgctcacttgtttgccctcaggcagccaaagcactttaacccctgcatagggagcagagggcggtacggcttctggattgtttcactgtgattcctaggttttttcgatgccatgcagtgtgtgcttttgtgtatggaagcaagtgtgggatgggtctttgcctttctgggtagggagctgtctaatccaagtcccaggcttttggcagcttctctgcaacccaccgtgggtcctggttgggagtggggagggtcaggttggggaaagatggggtagagtgtagatggcttggttccagaggtgagggggccagggctgctgccatcctggcctggtggaggttggggagctgtaggagagctagtgagtcgagacttagaagaatggggccacatagcagcagaggactggtgtaagggagggaggggtagggacagaagctagacccaatctcctttgggatgtgggcagggagggaagcaggcttggagggttaatttacccacagaatgtgatagtaataggggagggaggctgctgtgggtttaactcctgggttggctgttgggtagacaggtggggaaaaggcccgtgagtcattgtaagcacaggtccaacttggccctgactcctgcgggggtatggggaagctgtgacagaaacgatgggtgctgtggtcctctgcaggccctcaccccttaacttcctcatgcagactggcactgggcagggcctctcatgtggcagccacatgtggcgttgtgaggccaccccatgtggggtctgtggtgagagtcctgtaggatccctgctcaagcagcacagaggaaggggcaagacgtggcctgtaggcactgtctcagcctgcagagaagaaagtgaggccgggagcctgagcctgggctggagccttctcccctccccagttggactaggggcagtgttaattttgaaaaggtgtgggtccctgtgtccttttccaggggtccaagggaacaggagaggtcactgggcctgttttctccctcctgaccctgcatctcccaccctgtgtatcatagggaactttcaccttaaaatctttctaagcaaagtgtgaataggatttttactccctttgtacagtattctgaggaacgcaaataaaagggcaacatgtttctgtt

SEQ ID NO: 68 - DNA, 2423 bp, Homo sapiens
gagagccgagctagcgacgagcagtcgttgcggccgccggcgccgcgggaggtggtggaggcctagccggagccgagaggtctcttgttcccgtcccacggtcccggcgtcacccctccggcgcccagtccccgtcccggaactcccgggcctgtcctgggcccccggtctgtgcactccgctcgccgcagcgcccggcccgggccgcacccgccggccccatgaggagggacgtgaacggagtgaccaagagcaggtttgagatgttctcaaatagtgatgaagctgtaatcaataaaaaacttcccaaagaactcctgttacggatattttcttttctagatgttgttaccctgtgccgctgtgctcaggtctccagggcctggaatgttctggctctggatggcagtaactggcagcgaattgacctatttgatttccagagggatattgagggccgagtagtggagaatatttcaaaacgatgtgggggctttttacgaaagttaagtcttcgtggatgtcttggagtgggagacaatgcattaagaacctttgcacaaaactgcaggaacattgaagtactgaatctaaatgggtgtacaaagacaacagacgctacatgtactagccttagcaagttctgttccaaactcaggcaccttgacttggcttcctgtacatcaataacaaacatgtctctaaaagctctgagtgagggatgtccactgttggagcagttgaacatttcctggtgtgaccaagtaaccaaggatggcattcaagcactagtgaggggctgtgggggtctcaaggccttattcttaaaaggctgcacgcagctagaagatgaagctctcaagtacataggtgcacactgccctgaactggtgactttgaacttgcagacttgcttgcaaatcacagatgaaggtctcattactatatgcagagggtgccataagttacaatccctttgtgcctctggctgctccaacatcacagatgccatcctgaatgctctaggtcagaactgcccacggcttagaatattggaagtggcaagatgttctcaattaacagatgtgggctttaccactctagccaggaattgccatgaacttgaaaagatggacctggaagagtgtgttcagataacagatagcacattaatccaactttctatacactgtcctcgacttcaagtattgagtctgtctcactgtgagctgatcacagatgatggaattcgtcacctggggaatggggcctgcgcccatgaccagctggaggtgattgagctggacaactgcccactaatcacagatgcatccctggagcacttgaagagctgtcatagccttgagcggatagaactctatgactgccagcaaatcacacgggctggaatcaagagactcaggacccatttacccaatattaaagtccacgcctacttcgcacctgtcactccacccccatcagtagggggcagcagacagcgcttctgcagatgctgcatcatcctatgacaatggaggtggtcaaccttggcgaactgagtatttaatgacacttctagagctaccgtggagtctctccagtggaagcaaccccagtgttctgagcaagggttacaaagtgagggagggcagtgtccagatccccagagccacacatacatacacatacacacccttacccccatccactctagctttgtgaccatgggactgaagtttgtgatggcttttttatcaagtagattggtaaaatttaaccattcctgttgaggtgcccataagaaaatcataggccaagatagggaggggcattccagcaaaccccgtgttaatgctactgtggtttttaaatttttgtctaggggtttctttggggattttagaacagcatctgctgtcctccggggtcaagaaaagcatggaaagacaatatatgatgtacccagggaccagaaagaaaatttctttgcatcttagaaatggtagacattcattgtgactaaagagcttctatgcttccttgtttccatgccaacatgctgagcatgctcacaaagaaggctcgtccattcctcctgtgttttagtatttggcccagaggtttcctaaatggttgccttgaaatcactgtggtccaaatgtaattcttacacactcaaattatcactgtctgtagcacacttgtgcacctgtcttacattctctgttgctcccccccacactcttgctcagtctgtcacctgttcagtctgcttactcactcaattgttacccttttgctgttgtcgtgtttacagtttgcattttgaatgattagttgggattaccaaacattttttaaaaagatattatcaataaatatttttttaattctaaattttaaaaaaaaaaaaaaaaaaa

SEQ ID NO: 69 - DNA, 1841 bp, Homo sapiens
agctgggaccggagggtgagcccggcagaggcagagacacacgcggagaggaggagaggctgagggagggaggtggagaaggacgggagaggcagagagaggagacacgcagagacactcaggaggggagagacaccgagacgcagagacactcaggaggggagagacaccgagacgcagagacacccaggccggggagcgcgagggagcgaggcacagacctggctcagcgagcgcggggggcgagccccgagtcccgagagcctgggggcgcgcccagcccgggcgccgaccctcctcccgctcccgcgccctcccctcggcgggcacggtatttttatccgtgcgcgaacagccctcctcctcctctcgccgcacagcccgccgcctgcgcgggggagcccagcacagaccgccgccgggaccccgagtcgcgcaccccagccccaccgcccaccccgcgcgccatggaccccaaggaccgcaagaagatccagttctcggtgcccgcgccccctagccagctcgacccccgccaggtggagatgatccggcgcaggagaccaacgcctgccatgctgttccggctctcagagcactcctcaccagaggaggaagcctccccccaccagagagcctcaggagaggggcaccatctcaagtcgaagagacccaacccctgtgcctacacaccaccttcgctgaaagctgtgcagcgcattgctgagtctcacctgcagtctatcagcaatttgaatgagaaccaggcctcagaggaggaggatgagctgggggagcttcgggagctgggttatccaagagaggaagatgaggaggaagaggaggatgatgaagaagaggaagaagaagaggacagccaggctgaagtcctgaaggtcatcaggcagtctgctgggcaaaagacaacctgtggccagggtctggaagggccctgggagcgcccaccccctctggatgagtccgagagagatggaggctctgaggaccaagtggaagacccagcactaagtgagcctggggaggaacctcagcgcccttccccctctgagcctggcacataggcacccagcctgcatctcccaggaggaagtggaggggacatcgctgttccccagaaacccactctatcctcaccctgttttgtgctcttcccctcgcctgctagggctgcggcttctgacttctagaagactaaggctggtctgtgtttgcttgtttgcccacctttggctgatacccagagaacctgggcacttgctgcctgatgcccacccctgccagtcattcctccattcacccagcgggaggtgggatgtgagacagcccacattggaaaatccagaaaaccgggaacagggatttgcccttcacaattctactccccagatcctctcccctggacacaggagacccacagggcaggaccctaagatctggggaaaggaggtcctgagaaccttgaggtacccttagatccttttctacccactttcctatggaggattccaagtcaccacttctctcaccggcttctaccagggtccaggactaaggcgtttttctccatagcctcaacattttgggaatcttcccttaatcacccttgctcctcctgggtgcctggaagatggactggcagagacctctttgttgcgttttgtgctttgatgccaggaatgccgcctagtttatgtccccggtggggcacacagcggggggcgccaggttttccttgtcccccagctgctctgcccctttccccttcttccctgactccaggcctgaacccctcccgtgctgtaataaatctttgtaaataa

SEQ ID NO: 70 - DNA, 748 bp, Homo sapiens
ggccgcgatgagcggggagccggggcagacgtccgtagcgccccctcccgaggaggtcgagccgggcagtggggtccgcatcgtggtggagtactgtgaaccctgcggcttcgaggcgacctacctggagctggccagtgctgtgaaggagcagtatccgggcatcgagatcgagtcgcgcctcgggggcacaggtgcctttgagatagagataaatggacagctggtgttctccaagctggagaatgggggctttccctatgagaaagatctcattgaggccatccgaagagccagtaatggagaaaccctagaaaagatcaccaacagccgtcctccctgcgtcatcctgtgactgcacaggactctgggttcctgctctgttctggggtccaaaccttggtctccctttggtcctgctgggagctccccctgcctctttcccctacttagctccttagcaaagagaccctggcctccactttgccctttgggtacaaagaaggaatagaagattccgtggccttgggggcaggagagagacactctccatgaacacttctccagccacctcatacccccttcccagggtaagtgcccacgaaagcccagtccactcttcgcctcggtaatacctgtctgatgccacagattttatttattctcccctaacccagggcaatgtcagctattggcagtaaagtggcgctacaaacactaaaaaaaaaaaaaaaaaaaaaaaaaaaaa

SEQ ID NO: 71 - DNA, 795 bp, Homo sapiens
tacggctgcgagaagacgacagaagctagacccaatctcctttgggatgtgggcagggagggaagcaggcttggagggttaatttacccacagaatgtgatagtaataggggagggaggctgctgcgggtttaactcctgggttggctgttgggtagacaggtggggaaaaggcccgtgagtcattgtaagcacaggtccaacttggccctgactcctgcgggggtatggggaagctgtgacagaaacgatgggtgctgtggtcctctgcaggccctcaccccttaacttcctcatacagactggcactgggcagggcctctcatgtggcagccacatgtggcgttgtgaggccaccccatgtggggtctgtggtgagagtcctgtaggatccctgctcaagcagcacagaggaaggggcaagacgtggcctgtaggcactgtctcagcctgcagagaagaaagtgaggccgggagcctgagcctgggctggagccttctcccctccccagttggactaggggcagtgttaattttgaaaaggtgtgggtccctgtgtcctcttccaggggtccaagggaacaggagaggtcactgggcctgttttctccctcctgaccctgcatctcccaccccgtgtatcatagggaactttcaccttaaaatctttctaagcaaagtgtgaataggatttttactccctttgtacagtattctgagaaacgcaaataaaagggcaacatgtttctgttaaaaaaaaaaaaaagtacgcaaaaaaaaaaaaaaaaaaaaaaaa

SEQ ID NO: 72 - DNA, 2356 bp, Homo sapiens
ggcacgaggccggaagtgacctctagagcggtggtgaaactggcagttgacggctcctgggactagatcccgcgaggtagcccccgaactatttctctacgttttctcttgatcctcccgaaatcttccagatccgcgtagtgaggaatcgtctccaccgtcatggggggcggagacctgaatctgaagaagagctggcacccgcagaccctcaggaatgtggagaaagtgtggaaggccgagcagaagcatgaggctgagcggaagaagattgaggagcttcagcgggagctgcgagaagagagagcccgggaagagatgcagcgctatgcggaggatgttggggccgtcaagaaaaaagaagaaaagttggactggatgtaccagggtcctggtgggatggtgaaccgtgacgagtacctgctggggcgccccattgacaaatatgtttttgagaagatggaggagaaggaggcaggctgctcttctgaaacaggacttctcccaggctctatctttgccccatcaggtgccaattcccttcttgacatggccagcaagatccgggaggacccactcttcatcatcaggaagaaggaggaggagaaaaaacgagaggtattaaataatccagtgaaaatgaagaaaatcaaagaattgttgcaaatgagtctggaaaaaaaggagaagaagaaaaagaaggagaagaaaaagaagcacaagaaacataagcacagaagctcgagtagtgatcgttccagcagcgaggatgagcacagtgcagggagatcacagaagaagatggcaaattcctcccctgttttgtccaaagtccctggatatggcttacaggtccggaactctgaccgtaaccagggtcttcagggtcctctgacagcagagcaaaagagagggcatgggatgaagaaccattccagatccagaagctcctcccactcacccccaagacatgccagcaagaagagcaccagggaagcagggtcccgggacaggaggtctcgatccctgggcagaaggtcacggtccccaagacccagcaaactgcacaactctaaggtgaacaggagagagacaggccaaactaggagcccatcacctaaaaaagaggtctaccaaaggcgacatgctcccggatacaccagaaaactctctgcagaggaattagagcgaaaacggcaagagatgatggaaaacgccaaatggagggaggaggagagactgaacatcctcaagaggcatgctaaggatgaggaacgggagcagaggctagagaagctggactcccgggatgggaagttcatccaccgcatgaagctggagagtgcatctacttcctccctggaggatcgggtgaagcggaatatctactctttacagagaacttcggtagctctggagaagaactttatgaaaagatgaaaactgtcccctctcttattggttttcctgcattttccagggaagctgctgaccccttaattctctttataagagttcaaatgacttctttcacagatgtcaaaccaccagtgttcaaagtgaccctgcttcattgagtcctgaaacagctcacttcctttgagagctagtgtgacttgctttgtgggacactcagtaactttgggttttgactctttaacgggtgggcactggaccatctcggtgggagtgcttgtgccactctggaaggctgttccctggggttgtgatgtttatcatgccacttccttcttacctgtgccaacagacctatttcactgcctcagcgtacaccagacccttcagaaacctctctggtgtcacccagatagattgtgcttactgagacaaatgaacgtttacttgatttagaagataatgtgacagaatgatgtcaggttaggtcaaagccaagggagtgacagaatctggaaaatcaaacaatacaaaaagccctaaatgaactgttaactatttgatctttggatgtaaaattgtaatgcgtatatgtacaaatgtacaatttttacatgcttttaaaaaaggttagctttgtgaaaataccttgtttggtcaatgactttactgggtaatagaaccacattgaaccttgatggcaagtaatacaataaggcaggccagctcgtttttctctctgaatctggctggtttaggaggagcctgggtttatcgacgagatctggagtatctattcttttccactgcttgcagtctccaatgtaggcagtgtaaaggtatagtaaaatgattttaggagtcagaaccaaattgccaatatgctccatggctcctaaaggaaaataaaatggaagtttttaaaaaaaaaaaaaaaaaa

SEQ ID NO: 73 - DNA, 1646 bp, Homo sapiens
gtggaatgtcatcagttaaggctattttcatttcttttgtggatcttcagttgcttcaggccatctggatgtatacatgcaggtcacagggaatatgatggcttagcttgggttcagaggcctgacacctcaggctgccaaatgtggaagatttaaatacttgaaccaataccctcctcccaaaaactgaaattggcttctgtttctgagttggtccaggcgcaatgttcagcgtatttgaggaaatcacaagaattgtagttaaggagatggatgctggaggggatatgattgccgttagaagccttgttgatgctgatagattccgctgcttccatctggtgggggagaagagaactttctttggatgccggcactacacaacaggcctcaccctgatggacattctggacacacatggggacaagtggttagatgaactggattctgggctccaaggtcaaaaggctgagtttcaaattctggataatgtagactcaacgggagagttgatagtgagattacccaaagaaataacaatttcaggcagtttccagggcttccaccatcagaaaatcaagatatcggagaaccggatatcccagcagtatctggctacccttgaaaacaggaagctgaagagggaactacccttttcattccgatcaattaatacgagagaaaacctgtatctggtgacagaaactctggagacggtaaaggaggaaaccctgaaaagcgaccggcaatataaattttggagccagatctctcagggccatctcagctataaacacaagggccaaagggaagtgaccatccccccaaatcgggtcctgagctatcgagtaaagcagcttgtcttccccaacaaggagacgatgagaaagtctttgggttcggaggattccagaaacatgaaggagaagttggaggacatggagagtgtcctcaaggacctgacagaggagaagagaaaagatgtgctaaactccctcgctaagtgcctcggcaaggaggatattcggcaggatctagagcaaagagtatctgaggtcctgatttccggggagctacacatggaggacccagacaagcctctcctaagcagcctttttaatgctgctggggtcttggtagaagcgcgtgcaaaagccattctggacttcctggatgccctgctagagctgtctgaagagcagcagtttgtggctgaggccctggagaaggggacccttcctctgttgaaggaccaggtgaaatctgtcatggagcagaactgggatgagctggccagcagtcctcctgacatggactatgaccctgaggcacgaattctctgtgcgctgtatgttgttgtctctatcctgctggagctggctgaggggcctacctctgtctcttcctaactacaaaagccctttctccccacaagcctctgggttttccctttaccagtctgtcctcactgccatcgccactaccatcctgtcaccagtgggacctctttaaaacaagcagccaaccattctttgatgtatcccattcgctccatgttaacatccaaaaccagcctggatttcatacatggacttctgattaaaagtggcaggttgtgcatgttaaaaaaaaaaaaaaaaaaaaaa

SEQ ID NO: 74 - DNA, 3340 bp, Homo sapiens
cgggcgcccagagacagcgccgcctcagatatcctgctggatgacattgtccttacccattctctcttcctcccgacggagaaatttctgcaggagctacaccagtactttgttcgggcaggaggcatggagggccctgaagggctgggccggaagcaagcctgtctagccatgcttctccatttcttggacacctaccaggggctgcttcaagaggaagagggggccggccacatcatcaaggatctatacctgctaattatgaaggacgagtccctttaccagggcctccgagaggacactctgaggctgcaccagctggtggagacggtggaactaaagattccagaggagaaccagccacccagcaagcaggtgaagccactcttccgccacttccgccggatagactcctgtctgcagacccgggtggccttccggggctctgatgagatcttctgccgtgtatacatgcctgaccactcttatgtgaccatacgcagccgcctttcagcatctgtgcaggacattctgggctctgtgacggagaaacttcaatattcagaggagcccgcggggcgtgaggattccctcatcctggtagctgtgtcctcctctggagagaaggtccttctccagcccactgaggactgtgttttcaccgcactgggcatcaacagccacctgtttgcctgtactcgggacagctatgaggctctggtgcccctccccgaggagatccaggtctcccctggagacacagagatccaccgagtggagcctgaggacgttgccaaccacctaactgccttccactgggagctgttccgatgtgtgcatgagctggagttcgtggactacgtgttccacggggagcgcggccgccgggagacggccaacttggagctgctgctgcagcgctgcagcgaggtcacgcactgggtggccaccgaagtgctgctctgcgaggccccgggcaagcgcgcgcagctgctcaagaagttcatcaagatcgcggccctctgcaagcagaaccaggacctgctgtctttctacgccgtggtcatggggctggacaacgccgctgtcagccgccttcgactcacctgggagaagctgccagggaaattcaagaacttgtttcgcaaatttgagaacctgacggacccctgcaggaaccacaaaagctaccgagaagtgatctccaaaatgaagccccctgtgattcccttcgtgcctctgatcctcaaagacctgactttcctgcacgaagggagtaagacccttgtagatggtttggtgaacatcgagaagctgcattcagtggccgaaaaagtgaggacaatccgcaaataccggagccggcccctttgcctggacatggaggcatcccccaatcacctgcagaccaaggcctatgtgcgccagtttcaggtcatcgacaaccagaacctcctcttcgagctctcctacaagctggaggcaaacagtcagtgagagtggaggctccagtcagacccgccagatccttgggcacctggcactcaagcactttgcacgatgtctcaaccaacatctgacatctttcccgtggagcaacttcctgctccacgggaaagaggtcgatggatttacccctggacccataagtctgttcatcctgctgaagtcccctccccattgctccttcaagccaaaactacactttgctggttcctgtcccctctgagaaaggggatagaaagctccttcctctatgtcctcccatcgagatctgttctggggatggagcttccaacttcctcttgcagcaggaaagaatgctgctcacccttctgtcttgcagagtgggattgtgggagggattggcagccttcttctccaccacctgtccagcttcttcctggtcagggctgggacccccaggaatattatgttgccgtgtgtgtgtgtgtgtgtgtgtgtgtgtgtgtgtgtgtgtgtgtcttcttttagggagcaggagtgcatctggtaattgagggtggatgttgtgtgtgctggggaggggtccttctgtttggtgctacccttgtctactctgcccctggatggtgcggggtgctttctccacccccacactccctgctcagctcctcgtgctgccctgcatgcccaggcttgtgagccaaggtgctttttggggcagggagtagcagcaggtgggaggggttacccatcagcccttgcaagtcccccactcaggcctctggaaggtccagggatgggctctgatgagagggtaaaagatgctcagggaaacacaggcctcagctgcctagaggaccctccccctgccttgcagtgggctcgggtagagcagtatcaggagctagggttgtctgctgcccacactcctgctttttgggatatctaactgctaaggagggagttgacatcccccttctggctcatgtgtctgacaccaacaacatggtctccgtccctctctcttagactctccctttgtcctccccatagagctggggtggggtggatccctatactggggcaggcagccccaaagtgggggagggggatggcagagactgtaaaggcgccactggactctggcaaggcctttattacctttactccctccctctcccatcaccagcctcaaggcctgaggggtgcaggggctcctggcagctactgggtgaggtttcctggcacagactcacccttctttctggcaccactctttcccttttgaagagacagcaacagccgtagcaaaagcagctgctgctcctgctatgagggtgtatatattttttacccaaagctctggaattgtacatttattttttaaaactcaaagagggaaagagccttgtatcatatgtgaacattgtatcataggtaatgttgtacagacccttttatacagtgatctgtcttgttcctgcagcaaaaatcctctatggacataggaggtgctgtgtcccatgccttcttgccctgacagtgtcccatgggcccccttctgctccctgccccctccctgctactgctgatgcactgtcctctccctgcagcccctggcttcccagccttcctcctgaccccttccaacagccttggaactccagctgccaccaccctctgggtcggacactgggacccactggcccagtcttggctgctgcttacccctagccttgatgcctgcccagggacccccagccccctcccgttgccctgcagctttaacagagtgaaccatgtgtattgtacaggcgcggttgtcattgcagaaaccgctgggtggagaagaagccgataaagtctatgaatc

SEQ ID NO: 75 - DNA, 4005 bp, Homo sapiens
gggcaacagtctgcccacctgtggacaccagatcctgggagctcctggttagcaagtgagatctctgggatgtcagtgaggctggttgaagaccagaggtaaactgcagaggtcaccacccccaccatgtcccaggtgatgtccagcccactgctggcaggaggccatgctgtcagcttggcgccttgtgatgagcccaggaggaccctgcacccagcacccagccccagcctgccaccccagtgttcttactacaccacggaaggctggggagcccaggccctgatggcccccgtgccctgcatggggccccctggccgactccagcaagccccacaggtggaggccaaagccacctgcttcctgccgtcccctggtgagaaggccttggggaccccagaggaccttgactcctacattgacttctcactggagagcctcaatcagatgatcctggaactggaccccaccttccagctgcttcccccagggactgggggctcccaggctgagctggcccagagcaccatgtcaatgagaaagaaggaggaatctgaagccttggacataaagtacatcgaggtgacctccgccagatcaaggtgccacgattggccccagcactgctccagcccctctgtcaccccgcccttcggctcccctcgcagtggtggcctcctcctttccagagacgtcccccgagagacacgaagcagcagtgagagcctcatcttctctgggaaccagggcagggggcaccagcgccctctgcccccctcagagggtctctcccctcgacccccaaattcccccagcatctcaatcccttgcatggggagcaaggcctcgagcccccatggtttgggctccccgctggtggcttctccaagactggagaagcggctgggaggcctggccccacagcggggcagcaggatctctgtgctgtcagccagcccagtgtctgatgtcagctatatgtttggaagcagccagtccctcctgcactccagcaactccagccatcagtcatcttccagatccttggaaagtccagccaactcttcctccagcctccacagccttggctcagtgtccctgtgtacaagacccagtgacttccaggctcccagaaaccccaccctaaccatgggccaacccagaacaccccactctccaccactggccaaagaacatgccagcatctgccccccatccatcaccaactccatggtggacatacccattgtgctgatcaacggctgcccagaaccagggtcttctccaccccagcggaccccaggacaccagaactccgttcaacctggagctgcttctcccagcaacccctgtccagccaccaggagcaacagccagaccctgtcagatgccccctttaccacatgcccagagggtcccgccagggacatgcagcccaccatgaagttcgtgatggacacatctaaatactggtttaagccaaacatcacccgagagcaagcaatcgagctgctgaggaaggaggagccaggggcttttgtcataagggacagctcttcataccgaggctccttcggcctggccctgaaggtgcaggaggttcccgcgtctgctcagaatcgaccaggtgaggacagcaatgacctcatccgacacttcctcatcgagtcgtctgccaaaggagtgcatctcaaaggagcagatgaggagccctactttgggagcctctctgccttcgtgtgccagcattccatcatggccctggccctgccctgcaaactcaccatcccacagagagaactgggaggtgcagatggggcctcggactctacagacagcccagcctcctgccagaagaaatctgcgggctgccacaccctgtacctgagctcagtgagcgtggagaccctgactggagccctggccgtgcagaaagccatctccaccacctttgagagggacatcctccccacgcccaccgtggtccacttcgaagtcacagagcagggcatcactctgactgatgtccagaggaaggtgtttttccggcgccattacccactcaccaccctccgcttctgtggtatggaccctgagcaacggaagtggcagaagtactgcaaaccctcctggatctttgggtttgtggccaagagccagacagagcctcaggagaacgtatgccacctctttgcggagtatgacatggtccagccagcctcgcaggtcatcggcctggtgactgctctgctgcaggacgcagaaaggatgtaggggagagactgcctgtgcacctaaccaacacctccaggggctcgctaaggagcccccctccaccccctgaatgggtgtggcttgtggccatattgacagaccaatctatgggactagggggattggcatcaagttgacacccttgaacctgctatggccttcagcagtcaccatcatccagaccccccgggcctcagtttcctcaatcatagaagaagaccaatagacaagatcagctgttcttagatgctggtgggcatttgaacatgctcctccatgattctgaagcatgcacacctctgaagacccctgcatgaaaataacctccaaggaccctctgaccccatcgacctgggccctgcccacacaacagtctgagcaagagacctgcagcccctgtttcgtggcagacagcaggtgcctggcggtgacccacggggctcctggcttgcagctggtgatggtcaagaactgactacaaaacaggaatggatagactctatttccttccatatctgttcctctgttccttttcccactttctgggtggctttttgggtccacccagccaggatgctgcaggccaagctgggtgtggtatttagggcagctcagcagggggaacttgtccccatggtcagaggagacccagctgtcctgcacccccttgcagatgagtatcaccccatcttttctttccacttggtttttatttttattttttttgagacagagtctcactgtcacccaggctgaactgcagtggtgtgatctaggctcactgcaacctccacctcccaggttcaagcaattatcctgcctcaggctcccgagtagctgggattacaggcatgtgcaactcacccagctaattttgtatttttagtagagacagggtttcaccatgttggccaggctggtcttgaactcctgaccgcaggtaatccacctgcttcggcctcccaaagtgctgggattacaggcgcaagccacccagcccagcttctttccattccttgataggcgagtattccaaagctggtatcgtagctgccctaatgttgcatattaggcggcgggggcagagataagggccatctctctgtgattctgcctcagctcctgtcttgctgagccctcccccaacccacgctccaacacacacacacacacacacacacacacacacacacacacacacacacacacgcccctctactgctatgtggcttcaaccagcctcacagccacacgggggaagcagagagtcaagaatgcaaagaggccgcttccctaagaggcttggaggagctgggctctatcccacacccacccccaccccacccccacccagcctccagaagctggaaccatttctcccgcaggcctgagttcctaaggaaaccaccctaccggggtggaagggagggtcagggaagaaacccactcttgctctacgaggagcaagtgcctgccccctcccagcagccagccctgccaaagttgcattatctttggccaaggctgggcctgacggttatgatttcagccctgggcctgcaggagaggctgagatcagcccacccagccagtggtcgagcactgccccgccgccaaagtctgcagaatgtgagatgaggttctcaaggtcacaggccccagtcccagcctgggggctggcagaggcccccatatactctgctacagctcctatcatgaaaaataaaatgt

SEQ ID NO: 76 - protein, 1093 aa, Homo sapiens
MKEMVGGCCVCSDERGWAENPLVYCDGHACSVAVHQACYGIVQVPTGPWFCRKCESQERAARVRCELCPHKDGALKRTDNGGWAHVVCALYIPEVQFANVLTMEPIVLQYVPHDRFNKTCYICEETGRESKAASGACMTCNRHGCRQAFHVTCAQMAGLLCEEEVLEVDNVKYCGYCKYHFSKMKTSRHSSGGGGGGAGGGGGSMGGGGSGFISGRRSRSASPSTQQEKHPTHHERGQKKSRKDKERLKQKHKKRPESPPSILTPPVVPTADKVSSSASSSSHHEASTQETSESSRESKGKKSSSHSLSHKGKKLSSGKGVSSFTSASSSSSSSSSSSGGPFQPAVSSLQSSPDFSAFPKLEQPEEDKYSKPTAPAPSAPPSPSAPEPPKADLFEQKVVFSGFGPIMRFSTTTSSSGRARAPSPGDYKSPHVTGSGASAGTHKRMPALSATPVPADETPETGLKEKKHKASKRSRHGPGRPKGSRNKEGTGGPAAPSLPSAQLAGFTATAASPFSGGSLVSSGLGGLSSRTFGPSGSLPSLSLESPLLGAGIYTSNKDPISHSGGMLRAVCSTPLSSSLLGPPGTSALPRLSRSPFTSTLPSSSASISTTQVFSLAGSTFSLPSTHIFGTPMGAVNPLLSQAESSHTEPDLEDCSFRCRGTSPQESLSSMSPISSLPALFDQTASAPCGGGQLDPAAPGTTNMEQLLEKQGDGEAGVNIVEMLKALHALQKENQRLQEQILSLTAKKERLQILNVQLSVPFPALPAALPAANGPVPGPYGLPPQAGSSDSLSTSKSPPGKSSLGLDNSLSTSSEDPHSGCPSRSSSSLSFHSTPPPLPLLQQSPATLPLALPGAPAPLPPQPQNGLGRAPGAAGLGAMPMAEGLLGGLAGSGGLPLNGLLGGLNGAAAPNPASLSQAGGAPTLQLPGCLNSLTEQQRHLLQQQEQQLQQLQQLLASPQLTPEHQTVVYQMIQQIQQKRELQRLQMAGGSQLPMASLLAGSSTPLLSAGTPGLLPTASAPPLLPAGALVAPSLGNNTSLMAAAAAAAAVAAAGGPPVLTAQTNPFLSLSGAEGSGGGPKGGTADKGASANQEKG

SEQ ID NO: 77 - protein, 344 aa, Homo sapiens
MHRTTRIKITELNPHLMCALCGGYFIDATTIVECLHSFCKTCIVRYLETNKYCPMCDVQVHKTRPLLSIRSDKTLQDIVYKLVPGLFKDEMKRRRDFYAAYPLTEVPNGSNEDRGEVLEQEKGALSDDEIVSLSIEFYEGARDRDEKKGPLENGDGDKEKTGVRFLRCPAAMTVMHLAKFLRNKMDVPSKYKVEVLYEDEPLKEYYTLMDIAYIYPWRRNGPLPLKYRVQPACKRLTLATVPTPSEGTNTSGASECESVSDKAPSPATLPATSSSLPSPATPSHGSPSSHGPPATHPTSPTPPSTASGATTAANGGSLNCLQTPSSTSRGRKMTVNGAPVPPLT

SEQ ID NO: 78 - protein, 416 aa, Homo sapiens
MSSNCTSTTAVAVAPLSASKTKTKKKHFVCQKVKLFRASEPILSVLMWGVNHTINELSNVPVPVMLMPDDFKAYSKIKVDNHLFNKENLPSRFKFKEYCPMVFRNLRERFGIDDQDYQNSVTRSAPINSDSQGRCGTRFLTTYDRRFVIKTVSSEDVAEMHNILKKYHQFIVECHGNTLLPQFLGMYRLTVDGVETYMVVTRNVFSHRLTVHRKYDLKGSTVAREASDKEKAKDLPTFKDNDFLNEGQKLHVGEESKKNFLEKLKRDVEFLAQLKIMDYSLLVGIHDVDRAEQEEMEVEERAEDEECENDGVGGNLLCSYGTPPDSPGNLLSFPRFFGPGEFDPSVDVYAMKSHESSPKKEVYFMAIIDILTPYDTKKKAAHAAKTVKHGAGAEISTVNPEQYSKRFNEFMSNILT

SEQ ID NO: 79 - protein, 500 aa, Homo sapiens
MRGELWLLVLVLREAARALSPQPGAGHDEGPGSGWAAKGTVRGWNRRARESPGHVSEPDRTQLSQDLGGGTLAMDTLPDNRTRVVEDNHSYYVSRLYGPSEPHSRELWVDVAEANRSQVKIHTILSNTHRQASRVVLSFDFPFYGHPLRQITIATGGFIFMGDVIHRMLTATQYVAPLMANFNPGYSDNSTVVYFDNGTVFVVQWDHVYLQGWEDKGSFTFQAALHHDGRIVFAYKEIPMSVPEISSSQHPVKTGLSDAFMILNPSPDVPESRRRSIFEYHRIELDPSKVTSMSAVEFTPLPTCLQHRSCDACMSSDLTFNCSWCHVLQRCSSGFDRYRQEWMDYGCAQEAEGRMCEDFQDEDHDSASPDTSFSPYDGDLTTTSSSLFIDSLTTEDDTKLNPYAGGDGLQNNLSPKTKGTPVHLGTIVGIVLAVLLVAAIILAGIYINGHPTSNAALFFIERRPHHWPAMKFRSHPDHSTYAEVEPSGHEKEGFMEAEQC

SEQ ID NO: 80 - protein, 509 aa, Homo sapiens
MEDIQTNAELKSTQEQSVPAESAAVLNDYSLTKSHEMENVDSGEGPANEDEDIGDDSMKVKDEYSERDENVLKSEPMGNAEEPEIPYSYSREYNEYENIKLERHVVSFDSSRPTSGKMNCDVCGLSCISFNVLMVHKRSHTGERPFQCNQCGASFTQKGNLLRHIKLHTGEKPFKCHLCNYACQRRDALTGHLRTHSVEKPYKCEFCGRSYKQRSSLEEHKERCRTFLQSTDPGDTASAEARHIKAEMGSERALVLDRLASNVAKRKSSMPQKFIGEKRHCFDVNYNSSYMYEKESELIQTRMMDQAINNAISYLGAEALCPLVQTPPAPTSEMVPVISSMYPIALTRAEMSNGAPQELERKSILLPEKSVPSERGLSPNNSGHDSTDTDSNHEERQNHIYQQNHMVLSRARNGMPLLKEVPRSYELLKPPPICPRDSVKVIDKEGEVMDVYRCDHCRVLFLDYVMFTIHMGCHGFRDPFECNMCGDRSHDRYEFSSHIARGEHRSLLK

SEQ ID NO: 81 - protein, 440 aa, Homo sapiens
MPIPPPPPPPPGPPPPPTFHQANTEQPKLSRDEQRGRGALLQDICKGTKLKKVTNINDRSAPILEKPKGSSGGYGSGGAALQPKGGLFQGGVLKLRPVGAKDGSENLAGKPALQIPSSRAAAPRPPVSAASGRPQDDTDSSRASLPELPRMQRPSLPDLSRPNTTSSTGMKHSSSAPPPPPPGRRANAPPTPLPMHSSKAPAYNREKPLPPTPGQRLHPGREGPPAPPPVKPPPSPVNIRTGPSGQSLAPPPPPYRQPPGVPNGPSSPTNESAPELPQRHNSLHRKTPGPVRGLAPPPPTSASPSLLSNRPPPPARDPPSRGAAPPPPPPVIRNGARDAPPPPPPYRMHGSEPPSRGKPPPPPSRTPAGPPPPPPPPLRNGHRDSITTVRSFLDDFESKYSFHPVEDFPAPEEYKHFQRIYPSKTNRAARGAPPLPPILR

SEQ ID NO: 82 - protein, 205 aa, Homo sapiens
MSIMSYNGGAVMAMKGKNCVAIAADRRFGIQAQMVTTDFQKIFPMGDRLYIGLAGLATDVQTVAQRLKFRLNLYELKEGRQIKPYTLMSMVANLLYEKRFGPYYTEPVIAGLDPKTFKPFICSLDLIGCPMVTDDFVVSGTCAEQMYGMCESLWEPNMDPDHLFETISQAMLNAVDRDAVSGMGVIVHIIEKDKITTRTLKARMD

SEQ ID NO: 83 - protein, 190 aa, Homo sapiens
LTRSCSTCCPAVACLVGRGVVTSGAMHQCWGEEMLQGMLLWGWATCPLSNPGRWGRTVGLQHPAVVSAFRALLLLMLTVHVSYLSLIRFDYGYNLVANVAIGLVNVVWWLAWCLWNQRRLPHVRKCVVVVLLLQGLSLLELLDFPPLFWVLDAHAIWHISTIPVHVLFFSFLEDDSLYLLKESEDKFKLD

SEQ ID NO: 84 - protein, 368 aa, Homo sapiens
APPPAASQGERMAGLAARLVLLAGAAALASGSQGDREPVYRDCVLQCEEQNCSGGALNHFRSRQPIYMSLAGWTCRDDCKYECMWVTVGLYLQEGHKVPQFHGKWPFSRFLFFQEPASAVASFLNGLASLVMLCRYRTFVPASSPMYHTCVAFAWVSLNAWFWSTVFHTRDTDLTEKMDYFCASTVILHSIYLCCVRTVGLQHPAVVSAFRALLLLMLTVHVSYLSLIRFDYGYNLVANVAIGLVNVVWWLAWCLWNQRRLPHVRKCVVVVLLLQGLSLLELLDFPPLFWVLDAHAIWHISTIPVHVLFFSFLEDDSLYLLKESEDKFKLVEADWIFALPLTPCPSLREGSYARTPTSGTRVACASFF

SEQ ID NO: 85 - protein, 190 aa, Homo sapiens; identical to SEQ ID NO: 83

SEQ ID NO: 86 - protein, 318 aa, Homo sapiens
MAGLAARLVLLAGAAALASGSQGDREPVYRDCVLQCEEQNCSGGALNHFRSRQPIYMSLAGWTCRDDCKYECMWVTVGLYLQEGHKVPQFHGKWPFSRFLFFQEPASAVASFLNGLASLVMLCRYRTFVPASSPMYHTCVAFAWVSLNAWFWSTVFHTRDTDLQRKWTTSVPPVSYTQSTCAASGPWGCSTQLWSSAFRALLLLMLTVHVSYLSLIRFDYGYNLVANVAIGLVNVVWWLAWCLWNQRRLPHVRKCVVVVLLLQGLSLLELLDFPPLFWVLDAHAIWHISTIPVHVLFFSFLEDDSLYLLKESEDKFKL

SEQ ID NO: 87 - protein, 226 aa, Homo sapiens
MAGLAARLVLLAGAAALASGSQGDREPVYRDCVLQCEEQNCSGGALNHFRSRQPIYMSLAGWTCRDDCKYECMWVTVGLYLQEGHKVPQFHGKWPFSRFLFFQEPASAVASFLNGLASLVMLCRYRTFVPASSPMYHTCVAFAWVSLNAWFWSTVFHTRDTDLTEKMDYFCASTVILHSIYLCCVRPGQRGVVAGLVPVEPAAAASRAQVRGGGLAAAGAVPARAA

SEQ ID NO: 88 - protein, 320 aa, Homo sapiens
MAGLAARLVLLAGAAALASGSQGDREPVYRDCVLQCEEQNCSGGALNHFRSRQPIYMSLAGWTCRDDCKYECMWVTVGLYLQEGHKVPQFHGKWPFSRFLFFQEPASAVASFLNGLASLVMLCRYRTFVPASSPMYHTCVAFAWVSLNAWFWSTVFHTRDTDLTEKMDYFCASTVILHSIYLCCVRTVGLQHPAVVSAFRALLLLMLTVHVSYLSLIRFDYGYNLVANVAIGLVNVVWWLAWCLWNQRRLPHVRKCVVVVLLLQGLSLLELLDFPPLFWVLDAHAIWHISTIPVHVLFFSFLEDDSLYLLKESEDKFKLD

SEQ ID NO: 89 - protein, 217 aa, Homo sapiens
APPPAASQGERMAGLAARLVLLAGAAALASGSQGDREPVYRDCVLQCEEQNCSGGALNHFRSRQPIYMSLAGWTCRDDCKYECMWVTVGLYLQEGHKVPQFHGKWPFSRFLFFQEPASAVASFLNGLASLVMLCRYRTFVPASSPMYHTCVAFAWVSLNAWFWSTVFHTRDTDLTEKMDYFCASTVILHSIYLCCVSFLEDDSLYLLKESEDKFKLD

SEQ ID NO: 90 - protein, 153 aa, Homo sapiens
MNVGTAHSEVNPNTRVMNSRGIWLSYVLAIGLLHIVLLSIPFVSVPVVWTLTNLIHNMGMYIFLHTVKGTPFETPDQGKARLLTHWEQMDYGVQFTASRKFLTITPIVLYFLTSFYTKYDQIHFVLNTVSLMSVLIPKLPQLHGVRIFGINKY

SEQ ID NO: 91 - protein, 436 aa, Homo sapiens
MRRDVNGVTKSRFEMFSNSDEAVINKKLPKELLLRIFSFLDVVTLCRCAQVSRAWNVLALDGSNWQRIDLFDFQRDIEGRVVENISKRCGGFLRKLSLRGCLGVGDNALRTFAQNCRNIEVLNLNGCTKTTDATCTSLSKFCSKLRHLDLASCTSITNMSLKALSEGCPLLEQLNISWCDQVTKDGIQALVRGCGGLKALFLKGCTQLEDEALKYIGAHCPELVTLNLQTCLQITDEGLITICRGCHKLQSLCASGCSNITDAILNALGQNCPRLRILEVARCSQLTDVGFTTLARNCHELEKMDLEECVQITDSTLIQLSIHCPRLQVLSLSHCELITDDGIRHLGNGACAHDQLEVIELDNCPLITDASLEHLKSCHSLERIELYDCQQITRAGIKRLRTHLPNIKVHAYFAPVTPPPSVGGSRQRFCRCCIIL

SEQ ID NO: 92 - protein, 204 aa, Homo sapiens
MDPKDRKKIQFSVPAPPSQLDPRQVEMIRRRRPTPAMLFRLSEHSSPEEEASPHQRASGEGHHLKSKRPNPCAYTPPSLKAVQRIAESHLQSISNLNENQASEEEDELGELRELGYPREEDEEEEEDDEEEEEEEDSQAEVLKVIRQSAGQKTTCGQGLEGPWERPPPLDESERDGGSEDQVEDPALSEPGEEPQRPSPSEPGT

SEQ ID NO: 93 - protein, 115 aa, Homo sapiens
MSGEPGQTSVAPPPEEVEPGSGVRIVVEYCEPCGFEATYLELASAVKEQYPGIEIESRLGGTGAFEIEINGQLVFSKLENGGFPYEKDLIEAIRRASNGETLEKITNSRPPCVIL

SEQ ID NO: 94 - protein, 144 aa, Homo sapiens
MGAVVLCRPSPLNFLIQTGTGQGLSCGSHMWRCEATPCGVCGESPVGSLLKQHRGRGKTWPVGTVSACREESEAGSLSLGWSLLPSPVGLGAVLILKRCGSLCPLPGVQGNRRGHWACFLPPDPASPTPCIIGNFHLKIFLSKV

SEQ ID NO: 95 - protein, 425 aa, Homo sapiens
MGGGDLNLKKSWHPQTLRNVEKVWKAEQKHEAERKKIEELQRELREERAREEMQRYAEDVGAVKKKEEKLDWMYQGPGGMVNRDEYLLGRPIDKYVFEKMEEKEAGCSSETGLLPGSIFAPSGANSLLDMASKIREDPLFIIRKKEEEKKREVLNNPVKMKKIKELLQMSLEKKEKKKKKEKKKKHKKHKHRSSSSDRSSSEDEHSAGRSQKKMANSSPVLSKVPGYGLQVRNSDRNQGLQGPLTAEQKRGHGMKNHSRSRSSSHSPPRHASKKSTREAGSRDRRSRSLGRRSRSPRPSKLHNSKVNRRETGQTRSPSPKKEVYQRRHAPGYTRKLSAEELERKRQEMMENAKWREEERLNILKRHAKDEEREQRLEKLDSRDGKFIHRMKLESASTSSLEDRVKRNIYSLQRTSVALEKNFMKR

SEQ ID NO: 96 - protein, 394 aa, Homo sapiens
MFSVFEEITRIVVKEMDAGGDMIAVRSLVDADRFRCFHLVGEKRTFFGCRHYTTGLTLMDILDTHGDKWLDELDSGLQGQKAEFQILDNVDSTGELIVRLPKEITISGSFQGFHHQKIKISENRISQQYLATLENRKLKRELPFSFRSINTRENLYLVTETLETVKEETLKSDRQYKFWSQISQGHLSYKHKGQREVTIPPNRVLSYRVKQLVFPNKETMRKSLGSEDSRNMKEKLEDMESVLKDLTEEKRKDVLNSLAKCLGKEDIRQDLEQRVSEVLISGELHMEDPDKPLLSSLFNAAGVLVEARAKAILDFLDALLELSEEQQFVAEALEKGTLPLLKDQVKSVMEQNWDELASSPPDMDYDPEARILCALYVVVSILLELAEGPTSVSS

SEQ ID NO: 97 - protein, 456 aa, Homo sapiens
MEGPEGLGRKQACLAMLLHFLDTYQGLLQEEEGAGHIIKDLYLLIMKDESLYQGLREDTLRLHQLVETVELKIPEENQPPSKQVKPLFRHFRRIDSCLQTRVAFRGSDEIFCRVYMPDHSYVTIRSRLSASVQDILGSVTEKLQYSEEPAGREDSLILVAVSSSGEKVLLQPTEDCVFTALGINSHLFACTRDSYEALVPLPEEIQVSPGDTEIHRVEPEDVANHLTAFHWELFRCVHELEFVDYVFHGERGRRETANLELLLQRCSEVTHWVATEVLLCEAPGKRAQLLKKFIKIAALCKQNQDLLSFYAVVMGLDNAAVSRLRLTWEKLPGKFKNLFRKFENLTDPCRNHKSYREVISKMKPPVIPFVPLILKDLTFLHEGSKTLVDGLVNIEKLHSVAEKVRTIRKYRSRPLCLDMEASPNHLQTKAYVRQFQVIDNQNLLFELSYKLEANSQ

SEQ ID NO: 98 - protein, 715 aa, Homo sapiens
MSQVMSSPLLAGGHAVSLAPCDEPRRTLHPAPSPSLPPQCSYYTTEGWGAQALMAPVPCMGPPGRLQQAPQVEAKATCFLPSPGEKALGTPEDLDSYIDFSLESLNQMILELDPTFQLLPPGTGGSQAELAQSTMSMRKKEESEALDIKYIEVTSARSRCHDWPQHCSSPSVTPPFGSPRSGGLLLSRDVPRETRSSSESLIFSGNQGRGHQRPLPPSEGLSPRPPNSPSISIPCMGSKASSPHGLGSPLVASPRLEKRLGGLAPQRGSRISVLSASPVSDVSYMFGSSQSLLHSSNSSHQSSSRSLESPANSSSSLHSLGSVSLCTRPSDFQAPRNPTLTMGQPRTPHSPPLAKEHASICPPSITNSMVDIPIVLINGCPEPGSSPPQRTPGHQNSVQPGAASPSNPCPATRSNSQTLSDAPFTTCPEGPARDMQPTMKFVMDTSKYWFKPNITREQAIELLRKEEPGAFVIRDSSSYRGSFGLALKVQEVPASAQNRPGEDSNDLIRHFLIESSAKGVHLKGADEEPYFGSLSAFVCQHSIMALALPCKLTIPQRELGGADGASDSTDSPASCQKKSAGCHTLYLSSVSVETLTGALAVQKAISTTFERDILPTPTVVHFEVTEQGITLTDVQRKVFFRRHYPLTTLRFCGMDPEQRKWQKYCKPSWIFGFVAKSQTEPQENVCHLFAEYDMVQPASQVIGLVTALLQDAERM

SEQ ID NO: 99 - DNA, 35 bp, Artificial sequence
  PCR primer
ccatatataaaaccactgtcctgtcctttgtggct

SEQ ID NO: 100 - DNA, 26 bp, Artificial sequence
  PCR primer
cccccatctgtctgtctatatttgtc

SEQ ID NO: 101 - DNA, 22 bp, Artificial sequence
  PCR primer
tgcctacgctgacgactatgtg

SEQ ID NO: 102 - DNA, 25 bp, Artificial sequence
  PCR primer
tttggttttctacaactgttgctat

SEQ ID NO: 103 - DNA, 19 bp, Artificial sequence
  PCR primer
gggctccacacaccagatg

SEQ ID NO: 104 - DNA, 21 bp, Artificial sequence
  PCR primer
acgctctgagcaccctctaca

SEQ ID NO: 105 - DNA, 31 bp, Artificial sequence
  PCR primer
tgtcacagggactgaaaacctctcctcatgt

SEQ ID NO: 106 - DNA, 17 bp, Artificial sequence
  PCR primer
cccaaggccacgagctt

SEQ ID NO: 107 - DNA, 24 bp, Artificial sequence
  PCR primer
tgttgctctcttaacgaatcgaaa

SEQ ID NO: 108 - DNA, 29 bp, Artificial sequence
  PCR primer
ctggtcaaacaaactctctgaacccctcc

SEQ ID NO: 109 - DNA, 20 bp, Artificial sequence
  PCR primer
tggtgaggaaaagcggacat

SEQ ID NO: 110 - DNA, 21 bp, Artificial sequence
  PCR primer
ctggcttggaggacagtgaag

SEQ ID NO: 111 - DNA, 24 bp, Artificial sequence
  PCR primer
ccaagccctccccatcccatgtat

SEQ ID NO: 112 - DNA, 21 bp, Artificial sequence
  PCR primer
gaggtgtcgtaccgcgttcta

SEQ ID NO: 113 - DNA, 21 bp, Artificial sequence
  PCR primer
ccgttctgctcttccctgtct

SEQ ID NO: 114 - DNA, 23 bp, Artificial sequence
  PCR primer
ccagacccgcttcactgacctgc

SEQ ID NO: 115 - DNA, 20 bp, Artificial sequence
  PCR primer
cgcctgtacttcagcatgga

SEQ ID NO: 116 - DNA, 18 bp, Artificial sequence
  PCR primer
gcggttcagctggtggaa

SEQ ID NO: 117 - DNA, 25 bp, Artificial sequence
  PCR primer
accccgaggcatcaccacaaatcat

SEQ ID NO: 118 - DNA, 23 bp, Artificial sequence
  PCR primer
agttctgcctctctgacaaccat

SEQ ID NO: 119 - DNA, 23 bp, Artificial sequence
  PCR primer
taggctcagagtcagacccaaac

SEQ ID NO: 120 - DNA, 21 bp, Artificial sequence
  PCR primer
ccctcgtgggcttgtgctcgg

SEQ ID NO: 121 - DNA, 21 bp, Artificial sequence
  PCR primer
aagccgccagttcatcttttt

SEQ ID NO: 122 - DNA, 25 bp, Artificial sequence
  PCR primer
cttgtggttcaagtcaaatgttcag

SEQ ID NO: 123 - DNA, 21 bp, Artificial sequence
  PCR primer
tctgcctgcgctctcgtcggt

SEQ ID NO: 124 - DNA, 18 bp, Artificial sequence
  PCR primer
gggctgggcacctgactt

SEQ ID NO: 125 - DNA, 20 bp, Artificial sequence
  PCR primer
cccaacaagggtcccagact

SEQ ID NO: 126 - DNA, 17 bp, Artificial sequence
  PCR primer
cggcgcattgagcggcg

SEQ ID NO: 127 - DNA, 20 bp, Artificial sequence
  PCR primer
cccaagggacttcgtgaatg

SEQ ID NO: 128 - DNA, 21 bp, Artificial sequence
  PCR primer
ggcgatccctgatgacaagta

SEQ ID NO: 129 - DNA, 29 bp, Artificial sequence
  PCR primer#
agcaccaactgtgaaccaggtacaatggc

SEQ ID NO: 130 - DNA, 19 bp, Artificial sequence
  PCR primer
gagggaggctctgctttgg

SEQ ID NO: 131 - DNA, 21 bp, Artificial sequence
  PCR primer
tcacaactagcgggtgaggag

SEQ ID NO: 132 - DNA, 21 bp, Artificial sequence
  PCR primer
tgcagaggaacggcgtgagcg

SEQ ID NO: 133 - DNA, 22 bp, Artificial sequence
  PCR primer
tgaggtttcctcccaaatcgta

SEQ ID NO: 134 - DNA, 22 bp, Artificial sequence
  PCR primer
cagctcaagggaagctgtcatc

SEQ ID NO: 135 - DNA, 24 bp, Artificial sequence
  PCR primer
cccccacatgttccccaagatgct

SEQ ID NO: 136 - DNA, 21 bp, Artificial sequence
  PCR primer
ggaggcgctaaaggtctacgt

SEQ ID NO: 137 - DNA, 21 bp, Artificial sequence
  PCR primer
tgatgcttcgcaggtcagtaa

SEQ ID NO: 138 - DNA, 26 bp, Artificial sequence
  PCR primer
ctcctgcccctcctaaagctgaagcc

SEQ ID NO: 139 - DNA, 17 bp, Artificial sequence
  PCR primer
ggacgcgtgggcttttc

SEQ ID NO: 140 - DNA, 20 bp, Artificial sequence
  PCR primer
tgtggctgtggacacctttc

SEQ ID NO: 141 - DNA, 25 bp, Artificial sequence
  PCR primer
ccacaagctgaaggcagacaaggcc

SEQ ID NO: 142 - DNA, 20 bp, Artificial sequence
  PCR primer
gcggattctcatggaacaca

SEQ ID NO: 143 - DNA, 20 bp, Artificial sequence
  PCR primer
ggtcagccaggagcttcttg

SEQ ID NO: 144 - DNA, 23 bp, Artificial sequence
  PCR primer
accaccttgcgcaggttgtccag

SEQ ID NO: 145 - DNA, 18 bp, Artificial sequence
  PCR primer
cgcatgcacgacctgaac

SEQ ID NO: 146 - DNA, 23 bp, Artificial sequence
  PCR primer
gtctcgatcttggacagcttctg

SEQ ID NO: 147 - DNA, 22 bp, Artificial sequence
  PCR primer
acactgtccacacggcccgagg

SEQ ID NO: 148 - DNA, 21 bp, Artificial sequence
  PCR primer
ctgggcagaatggaaggatct

SEQ ID NO: 149 - DNA, 22 bp, Artificial sequence
  PCR primer
gggactctagcagacccacact

SEQ ID NO: 150 - DNA, 22 bp, Artificial sequence
  PCR primer
cacccacctggattccctgttc

SEQ ID NO: 151 - DNA, 23 bp, Artificial sequence
  PCR primer
ccttcagacaggcgtagatgatg

SEQ ID NO: 152 - DNA, 29 bp, Artificial sequence
  PCR primer
gggtattatttctttattaggtgccactt

SEQ ID NO: 153 - DNA, 30 bp, Artificial sequence
  PCR primer
ttccctaaggctttcagtacccaggatctg

SEQ ID NO: 154 - DNA, 18 bp, Artificial sequence
  PCR primer
ccagcttggccctttcct

SEQ ID NO: 155 - DNA, 23 bp, Artificial sequence
  PCR primer
gaatgggtcgcttttgttcttag

SEQ ID NO: 156 - DNA, 22 bp, Artificial sequence
  PCR primer
tcacggacctcagcctgcccct

SEQ ID NO: 157 - DNA, 21 bp, Artificial sequence
  PCR primer
tggtgaaggtgtcagccatgt

SEQ ID NO: 158 - DNA, 21 bp, Artificial sequence
  PCR primer
tcagagtgcagcaatggcttt

SEQ ID NO: 159 - DNA, 20 bp, Artificial sequence
  PCR primer
acctccttccccagctcccc

SEQ ID NO: 160 - DNA, 24 bp, Artificial sequence
  PCR primer
ggcaacatcttacttgtcctttga

SEQ ID NO: 161 - DNA, 25 bp, Artificial sequence
  PCR primer
ccaaggaagcacagacaactatttc

SEQ ID NO: 162 - DNA, 30 bp, Artificial sequence
  PCR primer
tcctccctatccatggcactaaaccacttc

SEQ ID NO: 163 - DNA, 19 bp, Artificial sequence
  PCR primer
tgggcaagggctcctatct

SEQ ID NO: 164 - DNA, 21 bp, Artificial sequence
  PCR primer
gttacccctggcagacgtatg

SEQ ID NO: 165 - DNA, 31 bp, Artificial sequence
  PCR primer
tgcctctgagtctgaatctcccaaagagaga

SEQ ID NO: 166 - DNA, 31 bp, Artificial sequence
  PCR primer
gagtagttatgtgattatttcagctcttgac

SEQ ID NO: 167 - DNA, 21 bp, Artificial sequence
  PCR primer
tcaaatgttgtccccgagtct

SEQ ID NO: 168 - DNA, 34 bp, Artificial sequence
  PCR primer
cagaaattcggaagacagaactattgtcatgcct

SEQ ID NO: 169 - DNA, 27 bp, Artificial sequence
  PCR primer
gattagtaacccatagcagttgaaggt

SEQ ID NO: 170 - DNA, 26 bp, Artificial sequence
  PCR primer
atttactgacggtggtctgaacatac

SEQ ID NO: 171 - DNA, 31 bp, Artificial sequence
  PCR primer
tgacagactccaaatcacaagcacagtcaac

SEQ ID NO: 172 - DNA, 25 bp, Artificial sequence
  PCR primer
tgatggtttggaggaaagtttattt

SEQ ID NO: 173 - DNA, 24 bp, Artificial sequence
  PCR primer
tttggttgggtctttagaggaatc

SEQ ID NO: 174 - DNA, 24 bp, Artificial sequence
  PCR primer
tgccaaccatgcatcaggtagccc

SEQ ID NO: 175 - DNA, 20 bp, Artificial sequence
  PCR primer
cagctcacctggcaacttca

SEQ ID NO: 176 - DNA, 20 bp, Artificial sequence
  PCR primer
cctgattttcccagcgatgt

SEQ ID NO: 177 - DNA, 19 bp, Artificial sequence
  PCR primer
cgccgctcccggttctgct

SEQ ID NO: 178 - DNA, 20 bp, Artificial sequence
  PCR primer
tggccaagcgtaagctgatt

SEQ ID NO: 179 - DNA, 21 bp, Artificial sequence
  PCR primer
gctgcagtgatcggatcatct

SEQ ID NO: 180 - DNA, 22 bp, Artificial Sequence
  MLLT6
caccatggagcccatcgtgctg

SEQ ID NO: 181 - DNA, 19 bp, Artificial Sequence
  MLLT6 for
atccccgaggtgcaatttg

SEQ ID NO: 182 - DNA, 21 bp, Artificial Sequence
  MLLT6 rev
agcgatcatgaggcacgtact

SEQ ID NO: 183 - DNA, 29 bp, Artificial Sequence
  ZNF144
cctgccagagataggagacccagacagct

SEQ ID NO: 184 - DNA, 19 bp, Artificial Sequence
  ZNF144 for
atccccctgagccttttca

SEQ ID NO: 185 - DNA, 19 bp, Artificial Sequence
  ZNF144 rev
cagcctctggtcccaccat

SEQ ID NO: 186 - DNA, 28 bp, Artificial Sequence
  PIP5K2B
tgatcatcaattccaaacctctcccgaa

SEQ ID NO: 187 - DNA, 19 bp, Artificial Sequence
  PIP5K2B for
ccccatggtgttccgaaac

SEQ ID NO: 188 - DNA, 19 bp, Artificial Sequence
  PIP5K2B rev
tgccaggagcctccatacc

SEQ ID NO: 189 - DNA, 29 bp, Artificial Sequence
  TEM7
cagccttctaaaacacaatgtattcatgt

SEQ ID NO: 190 - DNA, 29 bp, Artificial Sequence
  TEM7 for
cctgaacttaatggtagaattcaaagatc

SEQ ID NO: 191 - DNA, 27 bp, Artificial Sequence
  TEM7 rev
tattaacactgagaatccatgcagaga

SEQ ID NO: 192 - DNA, 35 bp, Artificial Sequence
  ZNFN1A3
tatctggtctcagggattgctcctatgtattcagc

SEQ ID NO: 193 - DNA, 20 bp, Artificial Sequence
  ZNFN1A3 for
cacagagccctgctgaagtg

SEQ ID NO: 194 - DNA, 23 bp, Artificial Sequence
  ZNFN1A3 rev
gcgaggtcattggtttttagaaa

SEQ ID NO: 195 - DNA, 22 bp, Artificial Sequence
  WIRE
ctgtgatccgaaatggtgccag

SEQ ID NO: 196 - DNA, 20 bp, Artificial Sequence
  WIRE for
ccgtctccacatccaaacct

SEQ ID NO: 197 - DNA, 20 bp, Artificial Sequence
  WIRE rev
acccatgcattcggtatggt

SEQ ID NO: 198 - DNA, 21 bp, Artificial Sequence
  PSMB3
agtggcacctgcgccgaacaa

SEQ ID NO: 199 - DNA, 21 bp, Artificial Sequence
  PSMB3 for
ccccatggtgactgatgactt

SEQ ID NO: 200 - DNA, 21 bp, Artificial Sequence
  PSMB3 rev
ccagagggactcacacattcc

SEQ ID NO: 201 - DNA, 29 bp, Artificial Sequence
  MGC9753
ccagaaactttccatcccaaaggcagtct

SEQ ID NO: 202 - DNA, 21 bp, Artificial Sequence
  MGC9753 for
ctgccccacaggaatagaatg

SEQ ID NO: 203 - DNA, 23 bp, ARTIFICIAL SEQUENCE
  MGC9753 rev
aaaaatccagtctgcttcaacca

SEQ ID NO: 204 - DNA, 20 bp, ARTIFICIAL SEQUENCE
  ORMDL3
agctgccccagctccacgga

SEQ ID NO: 205 - DNA, 21 bp, ARTIFICIAL SEQUENCE
  ORMDL3 for
tccctgatgagcgtgcttatc

SEQ ID NO: 206 - DNA, 28 bp, ARTIFICIAL SEQUENCE
  ORMDL3 rev
tctcagtacttattgattccaaaaatcc

SEQ ID NO: 207 - DNA, 25 bp, ARTIFICIAL SEQUENCE
  MGC15482
tccagtggaagcaaccccagtgttc

SEQ ID NO: 208 - DNA, 25 bp, ARTIFICIAL SEQUENCE
  MGC15482 for
cacttctagagctaccgtggagtct

SEQ ID NO: 209 - DNA, 22 bp, ARTIFICIAL SEQUENCE
  MGC15482 rev
ccctcactttgtaacccttgct

SEQ ID NO: 210 - DNA, 20 bp, ARTIFICIAL SEQUENCE
  PPP1R1B
cagcgtggcgcaacaaccca

SEQ ID NO: 211 - DNA, 21 bp, ARTIFICIAL SEQUENCE
  PPP1R1B for
gggattgtttcgccacacata

SEQ ID NO: 212 - DNA, 20 bp, ARTIFICIAL SEQUENCE
  PPP1R1B rev
ccgatgttaaggcccatagc

SEQ ID NO: 213 - DNA, 27 bp, ARTIFICIAL SEQUENCE
  MGC14832
taaaatgtccggccaacatgagttccc

SEQ ID NO: 214 - DNA, 17 bp, ARTIFICIAL SEQUENCE
  MGC14832 for
cgcagtgcctggcacat

SEQ ID NO: 215 - DNA, 20 bp, ARTIFICIAL SEQUENCE
  MGC14832 rev
gacaccccctgacctatgga

SEQ ID NO: 216 - DNA, 25 bp, ARTIFICIAL SEQUENCE
  LOC51242
cagtgacctctcccgttcccttgga

SEQ ID NO: 217 - DNA, 20 bp, ARTIFICIAL SEQUENCE
  LOC51242 for
tgggtccctgtgtcctcttc

SEQ ID NO: 218 - DNA, 20 bp, ARTIFICIAL SEQUENCE
  LOC51242 for
agggtcaggagggagaaaac

SEQ ID NO: 219 - DNA, 26 bp, ARTIFICIAL SEQUENCE
  FLJ20291
ccagtgcccacccgttaaagagtcaa

SEQ ID NO: 220 - DNA, 24 bp, ARTIFICIAL SEQUENCE
  FLJ20291 for
ttgtgggacactcagtaactttgg

SEQ ID NO: 221 - DNA, 20 bp, ARTIFICIAL SEQUENCE
  FLJ20291 rev
acaagcactcccaccgagat

SEQ ID NO: 222 - DNA, 24 bp, ARTIFICIAL SEQUENCE
  PRO2521
agtctgtcctcactgccatcgcca

SEQ ID NO: 223 - DNA, 21 bp, ARTIFICIAL SEQUENCE
  PRO2521 for
aagcctctgggttttcccttt

SEQ ID NO: 224 - DNA, 20 bp, ARTIFICIAL SEQUENCE
  PRO2521 rev
cccactggtgacaggatggt

SEQ ID NO: 225 - DNA, 23 bp, ARTIFICIAL SEQUENCE
  LINK-GEFII
catctgacatctttcccgtggag

SEQ ID NO: 226 - DNA, 21 bp, ARTIFICIAL SEQUENCE
  LINK-GEFII for
ctttgcacgatgtctcaacca

SEQ ID NO: 227 - DNA, 18 bp, ARTIFICIAL SEQUENCE
  LINK-GEFII rev
tttcccgtggagcaggaa

SEQ ID NO: 228 - DNA, 26 bp, ARTIFICIAL SEQUENCE
  CTEN
ccgccgcctaatatgcaacattaggg

SEQ ID NO: 229 - DNA, 23 bp, ARTIFICIAL SEQUENCE
  CTEN for
cgagtattccaaagctggtatcg

SEQ ID NO: 230 - DNA, 24 bp, ARTIFICIAL SEQUENCE
  CTEN rev
atcacagagagatggcccttatct

SEQ ID NO: 231 - DNA, 25 bp, Artificial Sequence
  D17S946 forward primer
acagtctatcaagcagaaaaatcct

SEQ ID NO: 232 - DNA, 16 bp, Artificial Sequence
  D17S946 reverse primer
tgccgtgccagagaga

SEQ ID NO: 233 - DNA, 20 bp, Artificial Sequence
  D17S1181 forward primer
gacaacagagcgagactccc

SEQ ID NO: 234 - DNA, 20 bp, Artificial Sequence
  D17S1181 reverse primer
gcccagcctgtcacttattc

SEQ ID NO: 235 - DNA, 18 bp, Artificial Sequence
  D17S2026 forward primer
tggtcattcgacaacgaa

SEQ ID NO: 236 - DNA, 18 bp, Artificial Sequence
  D17S2026 reverse primer
cagcattggatgcaatcc

SEQ ID NO: 237 - DNA, 20 bp, Artificial Sequence
  D17S838 forward primer
ctccagaatccagaccatga

SEQ ID NO: 238 - DNA, 20 bp, Artificial Sequence
  D17S838 reverse primer
aggacagtgtgtagcccttc

SEQ ID NO: 239 - DNA, 20 bp, Artificial Sequence
  D17S250 forward primer
ggaagaatcaaatagacaat

SEQ ID NO: 240 - DNA, 24 bp, Artificial Sequence
  D17S250 reverse primer
gctggccatatatatatttaaacc

SEQ ID NO: 241 - DNA, 23 bp, Artificial Sequence
  D17S1818 forward primer
cataggtatgttcagaaatgtga

SEQ ID NO: 242 - DNA, 18 bp, Artificial Sequence
  D17S1818 reverse primer
tgcctactggaaaccaga

SEQ ID NO: 243 - DNA, 23 bp, Artificial Sequence
  D17S614 forward primer
aaggggaaggggctttcaaagct

SEQ ID NO: 244 - DNA, 23 bp, Artificial Sequence
  D17S614 reverse primer
  misc_feature (1)..(1): n=a, c, g or t
nggaggttgcagtgagccaagat

SEQ ID NO: 245 - DNA, 23 bp, Artificial Sequence
  D17S2019 forward primer
caaaagcttatgatgctcaaacc

SEQ ID NO: 246 - DNA, 22 bp, Artificial Sequence
  D17S2019 reverse primer
ttgtttccctttgactttctga

SEQ ID NO: 247 - DNA, 25 bp, Artificial Sequence
  D17S608 forward primer
taggttcacctctcattttcttcag

SEQ ID NO: 248 - DNA, 24 bp, Artificial Sequence
  D17S608 reverse primer
  misc_feature (17)..(17): n=a, c, g or t
gtctgggtctttatggngcttgtg

SEQ ID NO: 249 - DNA, 20 bp, Artificial Sequence
  D17S1655 forward primer
cggaccagagtgttccatgg

SEQ ID NO: 250 - DNA, 20 bp, Artificial Sequence
  D17S1655 reverse primer
gcatacagcaccctctacct

SEQ ID NO: 251 - DNA, 25 bp, Artificial Sequence
  D17S2147 forward primer
aggggagaataaataaaatctgtgg

SEQ ID NO: 252 - DNA, 22 bp, Artificial Sequence
  D17S2147 reverse primer
caggagtgagacactctccatg

SEQ ID NO: 253 - DNA, 22 bp, Artificial Sequence
  D17S754 forward primer
tggattcactgactcagcctgc

SEQ ID NO: 254 - DNA, 22 bp, Artificial Sequence
  D17S754 reverse primer
gcgtgtctgtctccatgtgtgc

SEQ ID NO: 255 - DNA, 18 bp, Artificial Sequence
  D17S1814 forward primer
tccccaatgacggtgatg

SEQ ID NO: 256 - DNA, 20 bp, Artificial Sequence
  D17S1814 reverse primer
ctggaggttggcttgtggat

SEQ ID NO: 257 - DNA, 18 bp, Artificial Sequence
  D17S2007 forward primer
ggtcccacgaatttgctg

SEQ ID NO: 258 - DNA, 20 bp, Artificial Sequence
  D17S2007 reverse primer
ccacccagaaaaacaggaga

SEQ ID NO: 259 - DNA, 20 bp, Artificial Sequence
  D17S1246 forward primer
tcgatctcctgaccttgtga

SEQ ID NO: 260 - DNA, 20 bp, Artificial Sequence
  D17S1246 reverse primer
ttgtcaccccattgcctttc

SEQ ID NO: 261 - DNA, 21 bp, Artificial Sequence
  D17S1979 forward primer
ccttggatagattcagctccc

SEQ ID NO: 262 - DNA, 21 bp, Artificial Sequence
  D17S1979 reverse primer
cttgtcccttctcaatcctcc

SEQ ID NO: 263 - DNA, 25 bp, Artificial Sequence
  D17S1984 forward primer
ttaagcaaggttttaattaagctgc

SEQ ID NO: 264 - DNA, 21 bp, Artificial Sequence
  D17S1984 reverse primer
gattacagtgctccctctccc

SEQ ID NO: 265 - DNA, 22 bp, Artificial Sequence
  G11580  forward primer
ggttttaattaagctgcatggc

SEQ ID NO: 266 - DNA, 21 bp, Artificial Sequence
  G11580  reverse primer
gattacagtgctccctctccc

SEQ ID NO: 267 - DNA, 20 bp, Artificial Sequence
  D17S1867 forward primer
agtttgacactgaggctttg

SEQ ID NO: 268 - DNA, 20 bp, Artificial Sequence
  D17S1867 reverse primer
tttagacttggtaactgccg

SEQ ID NO: 269 - DNA, 24 bp, Artificial Sequence
  D17S1788 forward primer
tgcagatgcctaagaacttttcag

SEQ ID NO: 270 - DNA, 19 bp, Artificial Sequence
  D17S1788 reverse primer
gccatgatctcccaaagcc

SEQ ID NO: 271 - DNA, 18 bp, Artificial Sequence
  D17S1836 forward primer
tcgaggttatggtgagcc

SEQ ID NO: 272 - DNA, 24 bp, Artificial Sequence
  D17S1836 reverse primer
aaactgtgtgtgtcaaaggatact

SEQ ID NO: 273 - DNA, 19 bp, Artificial Sequence
  D17S1787 forward primer
gctgatctgaagccaatga

SEQ ID NO: 274 - DNA, 19 bp, Artificial Sequence
  D17S1787 reverse primer
tacatgaaggcatggtctg

SEQ ID NO: 275 - DNA, 23 bp, Artificial Sequence
  D17S1660 forward primer
ctaatataatcctgggcacatgg

SEQ ID NO: 276 - DNA, 18 bp, Artificial Sequence
  D17S1660 reverse primer
gctgcggaccagacagat

SEQ ID NO: 277 - DNA, 22 bp, Artificial Sequence
  D17S2154 forward primer
gataaaaacaagcactggctcc

SEQ ID NO: 278 - DNA, 20 bp, Artificial Sequence
  D17S2154 reverse primer
cccacggctttcttgatcta

SEQ ID NO: 279 - DNA, 21 bp, Artificial Sequence
  D17S1955 forward primer
tgtaatgtaagccccatgagg

SEQ ID NO: 280 - DNA, 25 bp, Artificial Sequence
  D17S1955 reverse primer
cactcaactcaacagtctaaaggtg

SEQ ID NO: 281 - DNA, 25 bp, Artificial Sequence
  D17S2098 forward primer
gtgagttcaagcatagtaattatcc

SEQ ID NO: 282 - DNA, 23 bp, Artificial Sequence
  D17S2098 reverse primer
attcagcctcagttcactgcttc

SEQ ID NO: 283 - DNA, 20 bp, Artificial Sequence
  D17S518 forward primer
gatccagtggagactcagag

SEQ ID NO: 284 - DNA, 20 bp, Artificial Sequence
  D17S518 reverse primer
tagtctctgggacacccaga

SEQ ID NO: 285 - DNA, 25 bp, Artificial Sequence
  D17S518 forward primer
attcctgagtgtctaccctgttgag

SEQ ID NO: 286 - DNA, 17 bp, Artificial Sequence
  D17S518 reverse primer
actgactgcgccactgc

SEQ ID NO: 287 - DNA, 20 bp, Artificial Sequence
  D11S4358 forward primer
tcgagaaggacaaaatcacc

SEQ ID NO: 288 - DNA, 20 bp, Artificial Sequence
  D11S4358 reverse primer
gaacagggttagtccattcg

SEQ ID NO: 289 - DNA, 19 bp, Artificial Sequence
  D17S964 forward primer
gttctttcctcttgtgggg

SEQ ID NO: 290 - DNA, 19 bp, Artificial Sequence
  D17S964 reverse primer
agtcagctgagattgtgcc

SEQ ID NO: 291 - DNA, 20 bp, Artificial Sequence
  D19S1091 forward primer
caagccaagacatcccagtt

SEQ ID NO: 292 - DNA, 20 bp, Artificial Sequence
  D19S1091 reverse primer
ccccacacacagctcatatg

SEQ ID NO: 293 - DNA, 22 bp, Artificial Sequence
  D17S1179 forward primer
ttttctctctcattccattggg

SEQ ID NO: 294 - DNA, 20 bp, Artificial Sequence
  D17S1179 reverse primer
gcaacagagggagactccaa

SEQ ID NO: 295 - DNA, 19 bp, Artificial Sequence
  D10S2160 forward primer
tcccatcccgtaagacctc

SEQ ID NO: 296 - DNA, 25 bp, Artificial Sequence
  D10S2160 reverse primer
tatggagtacctactctatgccagg

SEQ ID NO: 297 - DNA, 20 bp, Artificial Sequence
  D17S1230 forward primer
attcaaagctggatcccttt

SEQ ID NO: 298 - DNA, 20 bp, Artificial Sequence
  D17S1230 reverse primer
agctgtgacaaatgcctgta

SEQ ID NO: 299 - DNA, 20 bp, Artificial Sequence
  D17S1338 forward primer
tcacctgagattgggagacc

SEQ ID NO: 300 - DNA, 18 bp, Artificial Sequence
  D17S1338 reverse primer
aagatggggcaggaatgg

SEQ ID NO: 301 - DNA, 19 bp, Artificial Sequence
  D17S2011 forward primer
tcactgtcctccaagccag

SEQ ID NO: 302 - DNA, 20 bp, Artificial Sequence
  D17S2011 reverse primer
aaacaccacactctcccctg

SEQ ID NO: 303 - DNA, 20 bp, Artificial Sequence
  D17S2011 forward primer
ttcttgggcttcccgtagcc

SEQ ID NO: 304 - DNA, 20 bp, Artificial Sequence
  D17S2011 reverse primer
ggggcagacgacttctcctt

SEQ ID NO: 305 - DNA, 23 bp, Artificial Sequence
  D17S2038 forward primer
ggggatacaacctttaaagttcc

SEQ ID NO: 306 - DNA, 25 bp, Artificial Sequence
  D17S2038 reverse primer
attcacctaatgaggattcttcttt

SEQ ID NO: 307 - DNA, 24 bp, Artificial Sequence
  D17S2091 forward primer
gctgaaatagccatcttgagctac

SEQ ID NO: 308 - DNA, 23 bp, Artificial Sequence
  D17S2091 reverse primer
tccgcatcctttttaagaggcac

SEQ ID NO: 309 - DNA, 24 bp, Artificial Sequence
  D17S649 forward primer
ctttcactctttcagctgaagagg

SEQ ID NO: 310 - DNA, 25 bp, Artificial Sequence
  D17S649 reverse primer
tgacgtgctatttcctgttttgtct

SEQ ID NO: 311 - DNA, 18 bp, Artificial Sequence
  D17S1190 forward primer
gtttgttgctatgcctgc

SEQ ID NO: 312 - DNA, 18 bp, Artificial Sequence
  D17S1190 reverse primer
caacacactaccccagga

SEQ ID NO: 313 - DNA, 20 bp, Artificial Sequence
  M87506 forward primer
actcctcatctgtagggtct

SEQ ID NO: 314 - DNA, 20 bp, Artificial Sequence
  M87506 reverse primer
gagtccgctacctgagtgct

SEQ ID NO: 315 - DNA, 4617 bp, Homo sapiens
gcctggagactaacagctgctcggaagaggagctcagcagcccgggtcgcggaggaggagggggcggccggcttctgctgcagcccccaggccctgaattacctccggtgcccttcccgctgcaggacttggtccctctggggcgcctgagtagaggggagcagcagcagcagcagcagcagcaacctcccccgcccccgcctcctcccgggcccctccggccactcgcgggtccttctcggaagggctccttcaaaatccgcctcagtcgcctctttcgcaccaagagctgcaacggtggctccggcggtggggatgggaccggcaagaggccttctggagagctggctgcttcagctgcgagcctgacagacatgggaggctctgcgggccgggagctggacgcggggaggaaacccaagttgacaagaactcaaagtgccttttctccggtctccttcagccccctgttcacaggtgaaactgtgtcgcttgtggatgtggacatttctcagcggggcctgacctctccacaccctccaactccccctcctcctccgagaagaagcctcagcctcctagatgatatcagtgggacgctgcctacatctgtccttgtggctccgatggggtcttccttgcagtctttccccctacctccgcctcctccaccccatgccccagatgcatttccccggattgctcccatccgagcagctgaatccctgcacagccaacccccacagcacctccagtgtcccctctaccggcctgactcgagcagctttgcagccagccttcgagagttggagaagtgtggttggtattgggggccaatgaattgggaagatgcagagatgaagctgaaagggaaaccagatggttctttcctggtacgagacagttctgatcctcgttacatcctgagcctcagtttccgatcacagggtatcacccaccacactagaatggagcactacagaggaaccttcagcctgtggtgtcatcccaagtttgaggaccgctgtcaatctgttgtagagtttattaagagagccattatgcactccaagaatggaaagtttctctatttcttaagatccagggttccaggactgccaccaactcctgtccagctgctctatccagtgtcccgattcagcaatgtcaaatccctccagcacctttgcagattccggatacgacagctcgtcaggatagatcacatcccagatctcccactgcctaaacctctgatctcttatatccgaaagttctactactatgatcctcaggaagaggtatacctgtctctaaaggaagcgcagctcatttccaaacagaagcaagaggtggaaccctccacgtagcgaggggctccctgctggtcaccaccaagggcatttggttgccaagctccagctttgaagaaccaaattaagctaccatgaaaagaagaggaaaagtgagggaacaggaaggttgggattctctgtgcagagactttggttccccacgcagccctggggcttggaagaagcacatgaccgtactctgcgtggggctccacctcacacccacccctgggcatcttaggactggaggggctccttggaaaactggaagaagtctcaacactgtttctttttcagaagttttgtttttgatatttatattacttggtatggaaaactcaccttgaaggcagttggggtttgtgcccgttggattgaaagtggtgcgaagggtgagcaggtccaaagaaggggtgggaggagggaacaggggacggccattcagctggtgccaaaggcagagttagagtctgtgctgtgggcctggaagatgggaggaggggcttgaggtttgcaaaggactgggagttcctgaggaagggggaatctgcctcttgttgccatgggcagctgttgtaggagcaggagagaaaggagggtgggtggtctcgaaaagaatattgggcaaaacctagccaattggccttagctgggagaagtagtgactcctgcatccttttttaaggtttaggaacctgagttcagaaacacctctcatggaagctgtactagttgtgatttacttaattccttaagttccatgacctgaagttaaccccgttcttcctctgctctcaacccattgccccttgagataactgtacatgtcactctgatcatggtaacagcatccctattgcttctgccagctgtcatggcaatcgtgtttcccatcacctgggcggttcagagccagtcatgggctgctgaatttaatggagcatgtttccaggttcttcatggcaaactgtactcatgacttaggagtgagtgttacttccatgtgcctgtcagcttgtgagggggaatgtggaggaaggtgagaaatacagctcccacagttgtgctcttcctagaggaagctctcagaacgcagccctcacgggatttccttaggtcagaggagagcatcgcatctcacgtttttaggtttatcactgccatcccacttctgggatgggaggtagcaagggcttctgtattttcttgtgttcattctagcaacccagacatttccggatcagatcctgctggtctccactcactggaaagtctgccagatgccgatttgagagctgcctgtccctgctttcaggaggagcggggagaaaaactccaatggtctttaatggtttctgcagctggccatggccaattcatatgacattgtgagtttgctttcttatagagctgctctggggagaggtttgctattgagatgtaacagtggagctgttgggtcttcatgactcctttgcgtgtgttccatgggactctctttctgggttccccatgcttatagttgcctcgtgtcacaagacagatactaatgtcaggtttgtggcttcctgatggtttgggtggggccccagtgtcctggtaatttataggactgcctcatctgggagcattgccttcttccttagtcccacgtggagtgaccagtcttcctccttgtagctgaacagggaggaaacttgcaccattacctgactgtggaagggtggcccacaagatgagctgtgcaccataaacacagcccacctctgatttgtcatgtggtacctcttctttccttggcttccatggtagtattaccaactaagcaagattgtgatcccagaaattggcttagcatgtgagtgttgcctcgtgagagtacaagtaatataactcgccatcttgcaggaagtgccaccccaatatagagcctgaagttggaatctgttgagatccttgggtggctgatatacagcctgggatctttcttttttttgttccttttcaaccacccataattttaatattattttttagtgtgtgtgtgcctggctttgcgctagatattgtagaaaacaaaaaaggtaaaagacgtaatatgtggcctaagggagcttttaggtgactgctgcacatcaagcagaaaatcaaggactatctaaagacgtttatagtagataagatcagggtagaccagatggtctgggaaagttctgtgcctctgaggctttgggttgtagtcaatggcaggacagacagtgagatgaaaaacacatgagcaaaagcaaggaagcagaaatctgcatggcatgtactgaacagtgcacagccctgttagagcaacatggttaaagaatcctttccagtgcggttttctagatggaagcttcccagccaccaggcagacctgagtgccgaggggttatgatggtgaggtggagcccaaagcccaaaggagtcagcaaggctcctgcccattgccagggcctcactatggtcagctcaggccatgtgagggaggcagagcctccgcaccccctgtgttactggggtttcttctggagaactcatacattcaggtacaaaacaaaccaactgaggaggtgtgacccaacctcaccacccacctttctcctcctggggagtgtcgtgttgaactgtgtctgtgtcagtgcactggtcccagccctggccgcagcctagtcctttctctgtggagtgggctgcaaaacagcagcgcaagaggagacagtcttcgtcaggtgtgggtgtttggtgcctgcatgggtggccttgcacagagcagttaggggaagatgagggggaggcatggggctgggccagctctctgggatacagcctggtcagagagtaaatggagcagaggaacaggtgtggcagcacctgcccttcacctccctgaccaggcccgtccctccttcgccagtgctgtgcagagctcatttaaatgtattcctttctaggtctgggcgcggtggctcacgcctgtaatcccagcactttgggaggctgaggtgggtggatcatgaggtcgggagttcaagaccagcttggccaaacagtgaaaccctatctctactaaaatacaaaaattagctgggcatggtggcatgcgcctgtagtcccagctacttgggaggctgagacaggagaattgcttgaacccaggaggcggaggttgcactgagccgagattgcgccactgccctctagcctagacgacagagtgagactccatctc

SEQ ID NO: 316 - DNA, 1713 bp, Homo sapiens
gagcacgtgcgcgtcctcgctgctcacatttcggcggagggcgcgctccctggaaaattccactcctgtgctagctccaccctatgcggcttttctcctacccgacgctcttcactctcagctcccttcccggcggcctttgcgggaacaagatggcagcccccatacctcaagggttctcttgtttatcgagggttttgggctggtggtctcggcagccagttctggtgactcagtccgcagctatagttccagtaagaactaaaaaacgtttcacacctcctatttatcaacctaaatttaaaacagaaaaggagtttatgcaacatgcccggaaagcaggattggttattcctccagaaaaatcggaccgttccatacatctggcctgtacagctggtatatttgatgcctatgttcctcctgagggtgatgcacgcatatcatctctttcaaaggagggactgatagagagaactgaacgaatgaagaagactatggcatcacaagtgtcaatccggaggataaaagactatgatgccaactttaaaataaaggacttccctgaaaaagctaaggatatctttattgaagctcacctttgtctaaataactcagaccatgaccgacttcataccttggtaactgaacactgttttccagacatgacttgggacatcaaatataagaccgtccgctggagctttgtggaatctttagagccctctcatgttgttcaagttcgctgttcaagtatgatgaaccagggcaacgtgtacggccagatcaccgtacgcatgcacacccggcagactctggccatctatgaccggtttggccggttgatgtatggacaggaagatgtacccaaggatgtcctggagtatgttgtattcgaaaagcagttgacaaacccctatggaagctggagaatgcataccaagatcgttcccccatgggcaccccctaagcagcccatccttaagacggtgatgatccctggccctcagctgaaaccagaagaagaatatgaagaggcacaaggagaggcccagaagcctcagctagcctgatgacaaaaatgacttctagggtgaagcctgggtgatgaggctgctggaagctttgaagtctcccattcccctcatgctataaaaagaactacctttgttctctcccatcctgctcaggtcttttcagcagtctcatcatcagcaaccatgactgatgactgggccctagcaggtggcaggtataacatggccatggacactcttcttttttaaattttatgtctagcttctgagtctagatgaaagacagtatgtttcagagaacattggatatcagtttttcccacagcagggactgtgagagacaaccagcagcatcctctttgtaatcacagggcagggatcagagtttgaaatgaaatgttgtcagggtgttggaaaaattttggtgagttctgcacatttcccctggttcaggctgggcatggaccagccttcagatggcagaagtggaagatgagcctacttgtgagcgatgtgactttaaggaaatgaagactggggaagaataattagtgtttataagacatttaagaggccctttttcatatactgactcactgatgaatcagcatttgcattttatggaaaaatataaatccaaagaaataatttatcccttaaaaaaaaaaaaaaaaaa

SEQ ID NO: 317 - DNA, 5632 bp, Homo sapiens
gtggcgatcatggcaagttagaagttttctgactcctttcggaggagcctccgggaccccggggagtaacaggtgtctggaggctgaagggtggaggggttcctggatttgggttttgcttgtgaaactcccctccaccctcctctctcgcacccacccaccccctcacccccttctttttccgtccttggaaaatggtgtccaagctcacgtcgctccagcaagaactcctgagcgccctgctgagctccggggtcaccaaggaggtgctggttcaggccttggaggagttgctgccatccccgaacttcggggtgaagctggagacgctgcccctgtcccctggcagcggggccgagcccgacaccaagccggtcttccatactctcaccaacggccacgccaagggccgcttgtccggcgacgagggctccgaggacggcgacgactatgacacacctcccatcctcaaggagctgcaggcgctcaacaccgaggaggcggcggagcagcgggcggaggtggaccggatgctcagtgaggacccttggagggctgctaaaatgatcaagggttacatgcagcaacacaacatcccccagagggaggtggtcgatgtcaccggcctgaaccagtcgcacctctcccagcatctcaacaagggcacccctatgaagacccagaagcgtgccgctctgtacacctggtacgtcagaaagcaacgagagatcctccgacaattcaaccagacagtccagagttctggaaatatgacagacaaaagcagtcaggatcagctgctgtttctctttccagagttcagtcaacagagccatgggcctgggcagtccgatgatgcctgctctgagcccaccaacaagaagatgcgccgcaaccggttcaaatgggggcccgcgtcccagcaaatcttgtaccaggcctacgatcggcaaaagaaccccagcaaggaagagagagaggccttagtggaggaatgcaacagggcagaatgtttgcagcgaggggtgtccccctccaaagcccacggcctgggctccaacttggtcactgaggtccgtgtctacaactggtttgcaaaccgcaggaaggaggaggcattccggcaaaagctggccatggacgcctatagctccaaccagactcacagcctgaaccctctgctctcccacggctccccccaccaccagcccagctcctctcctccaaacaagctgtcaggagtgcgctacagccagcagggaaacaatgagatcacttcctcctcaacaatcagtcaccatggcaacagcgccatggtgaccagccagtcggttttacagcaagtctccccagccagcctggacccaggccacaatctcctctcacctgatggtaaaatgatctcagtctcaggaggaggtttgcccccagtcagcaccttgacgaatatccacagcctctcccaccataatccccagcaatctcaaaacctcatcatgacacccctctctggagtcatggcaattgcacaaagcctcaacacctcccaagcacagagtgtccctgtcatcaacagtgtggccggcagcctggcagccctgcagcccgtccagttctcccagcagctgcacagccctcaccagcagcccctcatgcagcagagcccaggcagccacatggcccagcagcccttcatggcagctgtgactcagctgcagaactcacacatgtacgcacacaagcaggaacccccccagtattcccacacctcccggtttccatctgcaatggtggtcacagataccagcagcatcagtacactcaccaacatgtcttcaagtaaacagtgtcctctacaagcctggtgatgcccacacaccacttacttcgtgcgcaacaacaaggaccctgttttccacaccatcaccctctgggcagctgtcatggaaaagcccagtgacctgaccagcacctgcgagaggtccctgcttacctgacggacgtcctgctggcacctcagacaatccactctcaggagcgcagcccgaagcccagtttcccttctatgcagtattgccacaatgcctctcccacgatgtcaaggactcctgtctgtcctggaggtgggagacaaggaacctccgaagaggaagcaagaaagccgtactgtctatgttgtgatccttcatcgaacaaactgatgcgaaaacttgaatctgttactgaaatgaggagagaaggacatgtgctattgaactgagccaaacacactgtaaatatccacagactccctcccctgcccccatcccaaatgatcttgagatttcttttaaagaagtaaatttgtccaatggctgtaaactataaactactgtaattaagtgcaatttcccctctgtgtcctctcccctctgccctgtatataatactaaagtgtctattagttttctttgtaaaggtcagagtcaaaatttcaaaagtgatctgtcccctctcccctcatggagaaacatcctaagtgggaagtgaagccccttgtcctctcccgcgaggcctggacacttatggggacagcataccttggactgactaccagctaactccagtctcctgacattaagacacacctctggatccctggaggggctgaatgtagtgtgtcagagtaacatgccagcttcctgtgggccaggagctcagccgtgcactccctaagaaaccccagggcagggaaactggctgtttgatagcagaagaaaaagttgcagtctcagaaagccttccattaaaacaatttattttatcactaaaaaaaagtggcgatcatggcaagttagaagttttctgactcctttcggaggagcctccgggaccccggggagtaacaggtgtctggaggctgaagggtggaggggttcctggatttgggttttgcttgtgaaactcccctccaccctcctctctcgcacccacccaccccctcacccccttctttttccgtccttggaaaatggtgtccaagctcacgtcgctccagcaagaactcctgagcgccctgctgagctccggggtcaccaaggaggtgctggttcaggccttggaggagttgctgccatccccgaacttcggggtgaagctggagacgctgcccctgtcccctggcagcggggccgagcccgacaccaagccggtcttccatactctcaccaacggccacgccaagggccgcttgtccggcgacgagggctccgaggacggcgacgactatgacacacctcccatcctcaaggagctgcaggcgctcaacaccgaggaggcggcggagcagcgggcggaggtggaccggatgctcagtgaggacccttggagggctgctaaaatgatcaagggttacatgcagcaacacaacatcccccagagggaggtggtcgatgtcaccggcctgaaccagtcgcacctctcccagcatctcaacaagggcacccctatgaagacccagaagcgtgccgctctgtacacctggtacgtcagaaagcaacgagagatcctccgacaattcaaccagacagtccagagttctggaaatatgacagacaaaagcagtcaggatcagctgctgtttctctttccagagttcagtcaacagagccatgggcctgggcagtccgatgatgcctgctctgagcccaccaacaagaagatgcgccgcaaccggttcaaatgggggcccgcgtcccagcaaatcttgtaccaggcctacgatcggcaaaagaaccccagcaaggaagagagagaggccttagtggaggaatgcaacagggcagaatgtttgcagcgaggggtgtccccctccaaagcccacggcctgggctccaacttggtcactgaggtccgtgtctacaactggtttgcaaaccgcaggaaggaggaggcattccggcaaaagctggccatggacgcctatagctccaaccagactcacagcctgaaccctctgctctcccacggctccccccaccaccagcccagctcctctcctccaaacaagctgtcaggagtgcgctacagccagcagggaaacaatgagatcacttcctcctcaacaatcagtcaccatggcaacagcgccatggtgaccagccagtcggttttacagcaagtctccccagccagcctggacccaggccacaatctcctctcacctgatggtaaaatgatctcagtctcaggaggaggtttgcccccagtcagcaccttgacgaatatccacagcctctcccaccataatccccagcaatctcaaaacctcatcatgacacccctctctggagtcatggcaattgcacaaagcctcaacacctcccaagcacagagtgtccctgtcatcaacagtgtggccggcagcctggcagccctgcagcccgtccagttctcccagcagctgcacagccctcaccagcagcccctcatgcagcagagcccaggcagccacatggcccagcagcccttcatggcagctgtgactcagctgcagaactcacacatgtacgcacacaagcaggaacccccccagtattcccacacctcccggtttccatctgcaatggtggtcacagataccagcagcatcagtacactcaccaacatgtcttcaagtaaacagtgtcctctacaagcctggtgatgcccacacaccacttacttcgtgcgcaacaacaaggaccctgttttccacaccatcaccctctgggcagctgtcatggaaaagcccagtgacctgaccagcacctgcgagaggtccctgcttacctgacggacgtcctgctggcacctcagacaatccactctcaggagcgcagcccgaagcccagtttcccttctatgcagtattgccacaatgcctctcccacgatgtcaaggactcctgtctgtcctggaggtgggagacaaggaacctccgaagaggaagcaagaaagccgtactgtctatgttgtgatccttcatcgaacaaactgatgcgaaaacttgaatctgttactgaaatgaggagagaaggacatgtgctattgaactgagccaaacacactgtaaatatccacagactccctcccctgcccccatcccaaatgatcttgagatttcttttaaagaagtaaatttgtccaatggctgtaaactataaactactgtaattaagtgcaatttcccctctgtgtcctctcccctctgccctgtatataatactaaagtgtctattagttttctttgtaaaggtcagagtcaaaatttcaaaagtgatctgtcccctctcccctcatggagaaacatcctaagtgggaagtgaagccccttgtcctctcccgcgaggcctggacacttatggggacagcataccttggactgactaccagctaactccagtctcctgacattaagacacacctctggatccctggaggggctgaatgtagtgtgtcagagtaacatgccagcttcctgtgggccaggagctcagccgtgcactccctaagaaaccccagggcagggaaactggctgtttgatagcagaagaaaaagttgcagtctcagaaagccttccattaaaacaatttattttatcactaaaaaaaa

SEQ ID NO: 318 - DNA, 3123 bp, Homo sapiens
gaactgtggcgctttctgggtaaagatggacgtccacgatctctttcgccggctcggcgcgggggccaaattcgacacgagacgcttctcggcagacgcagctcgattccagataggaaaaaggaaatatgactttgattcttcggaggtgcttcagggactggacttttttggaaacaagaagtctgtcccaggtgtgtgtggagcatcacaaacacatcagaagccccaaaatggagagaaaaaagaagagagcctaactgaaaggaagagggagcagagcaagaaaaaaaggaagacgatgacttcagagacagggtttcaccatgttggccagtatggtctcgatctcctgacctcgtgattcacccaccttgggctcccaaagtgctgggattacagatgtgagccaccacgcccagccagaaattgcttcccaagaagaaggtgctactatacagtggatgtcatctgtagaagcaaagattgaagacaaaaaagttcagagagaaagtaaactaacttccggaaagttggagaatctcagaaaagaaaagataaacttcttgcggaataaacacaaaattcacgtccaaggaaccgatcttcctgacccaattgctacatttcagcaacttgaccaggaatataaaatcaattctcgactacttcagaacattctagatgcaggcttccaaatgcctacgccaatccaaatgcaagccatcccagttatgctgcatggtcgggaacttctggcttctgctccaactggatctggaaaaacattagcttttagcattcctattttaatgcagctgaaacaacccgcaaataaaggcttcagagccctgattatatcaccaacacgagaacttgccagccagattcacagagagttaataaaaatttctgagggaacaggattcagaatacacatgatccacaaagcagcagtggcagccaagaaatttggacctaaatcatctaaaaagtttgatattcttgtgactactccaaatcgactaatctatttattaaagcaagatccccccggaatcgacctagcaagtgttgagtggcttgtagtagacgaatcagataaactgtttgaagatggcaaaactgggttcagagaccagctggcttccattttcctggcctgcacatcccacaaggtccgaagagctatgttcagtgcaacttttgcatatgatgttgaacagtggtgcaaactcaacctggacaatgtcatcagtgtgtccattggagcaaggaattctgcagtagaaactgtagaacaagagcttctctttgttggatctgagaccggaaaacttctggccgtgagagaacttgttaaaaagggtttcaatccacctgttcttgtttttgttcagtccattgaaagggctaaagaactttttcatgagctcatatatgaaggtattaatgtggatgttattcatgcagagagaacacaacaacagagagataacacagtccacagtttcagagcaggaaaaatctgggttctgatttgtacagccttgctagcaagagggattgattttaaaggtgtgaacttggtgatcaactatgactttccaactagctcagtggaatatatccacaggataggtcgaactggaagagcagggaataagggaaaagcaattacatttttcactgaggatgataagccattattaagaagcgttgctaatgttatacagcaggctgggtgtcctgtaccagaatacataaaaggttttcagaaactactaagcaaacaaaagaaaaagatgattaagaaaccattggaaagggagagcattagtacaactccaaaatgtttcttagaaaaagctaaggataaacagagaaaggtcactggtcagaacagcaagaagaaagtagctcttgaagacaaaagttaaaaacagactttaaaaatactgtcccagaaatgtaattttatgatcccagcatgaatgttattttcatggaatacttgaagtcttacagtcacctgtaccaaacatttgaaatcaactacaagtacatgggactggtgataaatgatcctaaactatcaagtcagtttcaatttgtaggtgccttttttttttcctgtagagatgagggtcttgccatgttgtccaggctggtcttgaactcctgacctcacacaatcctcctgccttagcctcctgagtaactgagattacaggcacaagctgctgcacccagctctgtaggtgacttttaaatgattatacaatggaaataacattcattgacatttctgtggtttgaatccagggagatacttcttatagaaaaacaaatgtttatgctaaaaataacaccaaaatgtggtgaactcttaaggacttttcccttcaagtgtgaaggaaggtgtgatgaatgctgtggagaggcatctggaacagaaattcaaaataaagccttgacattaaataccccttccactgctcactttgtggatggtagcatgagctgtctaccaagaagaaacctgctgctctcttaattttaatatttcctaatttgttgatggccttttgtgttgtgaaccacaacaaagagaggcctcttttgtggctggttattccagttccctgggattttaaattctttggtctattaagtatccttgtattggatacgtaataccttagtgctgtcataatgttgcacaagatcatgatcagcttctccctttcttcattttctgtgatttaaccatgttctttcctgtctctttccatttaagatattttatttgaatactgataaacattttatcctgataaggaagaatgttcttgttacttgatatacctctgtcttcattctcttacagcttatctttccttaggttgatggtgcctcatttaataagtagatctctacttaagctaaaggattatgatcatatggtgttggagactattagctattagatttttctcaaaatatgagttttgtacaatggaatgaaaaagtgacttcatatacgtaagactggtgcctaagaatgacttgaatgttatcagtactaccacagaactataatatacattgccttttctcagc

SEQ ID NO: 319 - DNA, 1817 bp, Homo sapiens
caaccatcctgaagctacaggtgctccctcctggaatctccaatggatttcagtcgcagaagcttccacagaagcctgagctcctccttgcaggcccctgtagtcagtacagtgggcatgcagcgcctcgggacgacacccagcgtttatgggggtgctggaggccggggcatccgcatctccaactccagacacacggtgaactatgggagcgatctcacaggcggcggggacctgtttgttggcaatgagaaaatggccatgcagaacctaaatgaccgtctagcgagctacctagaaaaggtgcggaccctggagcagtccaactccaaacttgaagtgcaaatcaagcagtggtacgaaaccaacgccccgagggctggtcgcgactacagtgcatattacagacaaattgaagagctgcgaagtcagattaaggatgctcaactgcaaaatgctcggtgtgtcctgcaaattgataatgctaaactggctgctgaggacttcagactgaagtatgagactgagagaggaatacgtctaacagtggaagctgatctccaaggcctgaataaggtctttgatgacctaaccctacataaaacagatttggagattcaaattgaagaactgaataaagacctagctctcctcaaaaaggagcatcaggaggaagtcgatggcctacacaagcatctgggcaacactgtcaatgtggaggttgatgctgctccaggcctgaaccttggcgtcatcatgaatgaaatgaggcagaagtatgaagtcatggcccagaagaaccttcaagaggccaaagaacagtttgagagacagactgcagttctgcagcaacaggtcacagtgaatactgaagaattaaaaggaactgaggttcaactaacggagctgagacgcacctcccagagccttgagatagaactccagtcccatctcagcatgaaagagtctttggagcacactctagaggagaccaaggcccgttacagcagccagttagccaacctccagtcgctgttgagctctctggaggcccaactgatgcagattcggagtaacatggaacgccagaacaacgaataccatatccttcttgacataaagactcgacttgaacaggaaattgctacttaccgccgccttctggaaggagaagacgtaaaaactacagaatatcagttaagcaccctggaagagagagatataaagaaaaccaggaagattaagacagtcgtgcaagaagtagtggatggcaaggtcgtgtcatctgaagtcaaagaggtggaagaaaatatctaaatagctaccagaaggagatgctgctgaggttttgaaagaaatttggctataatcttatctttgctccctgcaagaaatcagccataagaaagcactattaatactctgcagtgattagaaggggtggggtggcgggaatcctatttatcagactctgtaattgaatataaatgttttactcagaggagctgcaaattgcctgcaaaaatgaaatccagtgagcactagaatatttaaaacatcattactgccatctttatcatgaagcacatcaattacaagctgtagaccacctaatatcaatttgtaggtaatgttcctgaaaattgcaatacatttcaattatactaaacctcacaaagtagaggaatccatgtaaattgcaaataaaccactttctaattttttcctgtttctgaaaaaaaaaaaaaaaaaaaaaaaaaaaaaaaaaaaaaaaaaaaaaaaaaaaaaaaaaaaaaaaaaaaaaaaaaaaaaaaaaa

SEQ ID NO: 320 - DNA, 1474 bp, Homo sapiens
ggcagatgaaatataagattcatcaaccacatttgacagcccatggcaggtttcctgttttccatcgtccctctgcaggtcacagacacacagagcccagccgtggcaggctcagccggggtccggggctgctaacaacggctacattcctcccccagggccaagggaaatcctgagcgcaggccagggttgtttggttttgaggtgtgctgggatgaaaggcaccctggaagtggaaggttcggtcattcattaattaattacatctataattgagggtttgttcttaagagcgagtcctttgaaagtactttccttcaaacagtgactgccacaaaggcatcagatattcaccaccttctcggctgcctcagcacagcaagctttattctgggacctgagatcctgttctgagctggctttcccttctccaggctcgctcaccctccctttagagatagtggatggtaagatgaccaatgctcagattattcttctcattgacaatgccaggatggcagtggatgacttcaacctcaagaaatggagaagcatcatgtgccaagtgacttcaatgtcaatgtgaaggtggatacaggtcccagggaagatctgattaaggtcctggaggatatgagacaagaatatgagcttataataaagaagaagcatcgagacttggacacttggtataaagaacagtctgcagccatgtcccaggaggcagccagtccagccactgtgcagagcagacaaggtgacatccacgaactgaagcgcacattccaggccctggagattgacctgcagacacagtacagcacgaaatctgctttggaaaacatgttatccgagacccagtctcggtactcctgcaagctccaggacatgcaagagatcatctcccactatgaggaggaactgacgcagctacgccatgaactggagcggcagaacaatgaataccaagtgctgctgggcatcaaaacccacctggagaaggaaatcaccacgtaccgacggctcctggagggagagagtgaagggacacgggaagaatcaaagtcgagcatgaaagtgtctgcaactccaaagatcaaggccataacccaggagaccatcaacggaagattagttctttgtcaagtgaatgaaatccaaaagcacgcatgagaccaatgaaagtttccgcctgttgtaaaatctattttcccccaaggaaagtccttgcacagacaccagtgagtgagttctaaaagatacccttggaattatcagactcagaaacttttattttttttttctgtaacagtctcaccagacttctcataatgctcttaatatattgcacttttctaatcaaagtgcgagtttatgagggtaaagctctactttcctactgcagccttcagattctcatcattttgcatctattttgtagccaataaaactccgcactagcaaaaaaaaaaaa

SEQ ID NO: 321 - DNA, 754 bp, Homo sapiens
caatcaaacccataaataccacagactctaatagccatggattgctgtgcctctcgaggctgcagtgtccccaccgggcctgccaccaccatctgctcctctgacaaatcctgccgctgtggagtctgcctgcccagcacctgcccacacacagtttggttactggagcccacctgctgtgacaactgtcccccaccctgccacattcctcagccctgcgtgcccacctgcttcctgctcaactcctgccagccaactccaggcctggagaccctcaacctcaccaccttcactcagccctgctgtgagccctgcctcccaagaggctgctaatggatggctactttgctcagtgcctgagattgaaaaagtcaacatagaagctttagcattcacctatctcagtacctacaactaatgtactctgctttagaaattggaacaaggatggtactaccacaatcaccccctgcaaaaaaaaagagaccaagaaactttcaatgaccattcagctataaccaactgcagtttgaatcagtggatgcctatagcttcctgaagctgttcgattccttcatattaaagtgtctctttctgtgggtggtttgggaattctgttttcagtcttgggtggtatctttctgaaaattaaggaagttcttcatgattatcctaataaattttacatctctggcatagcacaaaaaaaaaaaaaaaaaaaaaaaaaaaaaaaaaaaaaaaaaaaaaaaaaaaa

SEQ ID NO: 322 - DNA, 749 bp, Homo sapiens
aagaaactgaaagctaaccagacgcccattgccatggattgctgtgcctctcgcagctgcagtgtccccactgggcctgccaccaccatctgctcctccgacaaatcctgccgctgtggagtctgcctgcccagcacctgcccacacacagtttggttactggagcccatctgctgtgacaactgtcccccaccctgccacattcctcagccctgcgtgcccacctgcttcctgctcaactcctgccagccaactccgggcctggagaccctcaacctcaccaccttcactcagccctgctgtgagccctgcctcccaagaggctgctgatggatggctactttgctcagtgcccgacaacgaagaatccagaagctgtcccttcagtattcacttgcctcagtagtttgccagatgttaaggtagaccagatgacccagatatgaagaacttacctttggttttaatgggggaaaaaaagaaaagtattttttatggttatttagctgaaaaaccatttggttcctgtgggcaggtgaatgagttttattagcaaaatactgtttcaatctttaagacctcagattacatgttcttgatcatattgcttcctggctcttgtttcttgtactgggtattttcatagaagaaaatttcttggtgggttttccaataaactatatttctctggcaaaaaaaaaaaaaaaaaaaaaaaaaaaaaaaaaaaaaaaaaaaaaaaaaaaaaaaaa

SEQ ID NO: 323 - DNA, 440 bp, Homo sapiens
gtgttccctgagataggtggatataaaagacccatagaggacaaccttgtagaagaaagccttcctttgccacaaaacattgtcctggtccactgtcactatgtcttgctgtgattcctatctccaaggatgctgcagcgtccccactggcctggccaccactatctgcccctctgacataagctgtcaatgtgaagtctgcctacccagcacctgtcctcatgagatcagcctccttcagcccacctgctgtgaacctggcccctgcctggctgcatgcctgactcctatgtgccatcctgttgactgctcaacaaatgccacccagctccaaccctgagcgggctctctgtcaccacctgcatccagagtgtgaaccaccttgctgctagccaaagagcttgcccacattaccctgaggaccttcagtagtcattaag

SEQ ID NO: 324 - DNA, 614 bp, Homo sapiens
agacttctctcaactcaacaaaaacccacctcccattgccatgtattgctgtgctctccgctcctgcagcgtccccaccggccctgccaccaccttctgctcatttgataaaagctgccgctgtggagtctgcctacccagcacctgcccacatgagatcagcctccttcagcccatctgctgtgacacctgccccccaccctgctgcaagcctgatacctatgtgccaacttgctggctgctcaacaactgtcacccgactcccggactgagtgggatcaacctgaccacctatgttcagcctggctgtgagagtccctgtgagccccgctgttaaccagccgagtctgcacaggttccgtgaggtggctgcccaatgtcctctgcaccatctgggcttcagcactcactactgcctacatcaaggctaaggccatcccaatccccggggccaagtcttgatgaatcttcttaattatttgcacatttgggtaccattggagacctcccttctgtcttttaggctatttcatcactctttgagaaataaccattttgaccatttgttaataaactttattctggcttagcaaaaaaaaaaaaaaaaaaaaaaa

SEQ ID NO: 325 - DNA, 1193 bp, Homo sapiens
cagaaactcctccaagcaacctaactcttaacccaacttctgacaccatgacctgctgccagaccagcttctgtggatatcccagcttctccatcagtgggacctgtggctccagctgctgccagccaagctgctgtgagaccagctgctgccagccacgcagctgccagactagcttctgcggatttcccagcttctcaaccagtgggacctgcagctccagttgctgccagccaagctgctgtgagaccagctgctgccagccaagctgctgtgagaccagctgctgccagccaagctgctgccagatcagctcctgcggaactggctgtggcattggtggtggcatcagctatggccaggagggcagcagtggagctgtgagcacccgtatcaggtggtgccgcccagacagtcgtgtggagggcacctacctacccccctgctgtgtggtgagctgcacgcccccatcctgctgccaactgcaccatgcccaggcctcctgctgccgcccgtcctactgtggacagtcctgctgccgcccagtctgctgctgtgagcccacttgctgaaagccagtttgcttattttcaattgcctaggtcacagtgtctctgaactgttcatcccttgaccacctctggaccactaacaagttctcagactttgcattgcttgtgatggagactactaagtatatgagctcacaattctatctgattccattctacaatgaataccttgacccttcactggggacacagaaatgctacaaagccacctgctgatcatcaatttgcttgggatatactatttctgatatttctgcaggattaaaaattactgacatgttgtggaatttatccatgagaactatccacaagtctaatgtttccatgctttataatctattttatcttgtttacctaaaattttttgcaacatcaaagacaccaaattatagccaagtgacattcctcaagtcaccagagagaatggaagctcatcacccaacattcagcttctaagaagtaggctggactttccacattttaacatctgatccatcccttggtttttggatcataatgatcttgcctgctggatatttcagttatatctgtgatacaatgtcttctgtcatttcttaataaatattatatactaggcaaagaaaaaaaaaaaaaaaaaaa

SEQ ID NO: 326 - DNA, 986 bp, Homo sapiens
aagcaacccagacttcataccagctcccaacaccatgacctgctgccagaccagcttctgtggatatcccagctgctccaccagtgggacatgcggctccagctgctgccagccaagctgctgtgagaccagctgctgccagccaagctgctgccagaccagcttctgcggatttcctagcttctcaactagtgggacctgcagctccagttgctgccagccaagctgctgtgagaccagctgctgccagccaagctgctgccagaccagctcctgcggaactggctgtggcattggtggtggcattggctatggccaggagggcagcagtggagctgtgagcacccgtatcaggtggtgccgcccagactgccgtgtggagggtacctgcctgcccccctgctgtgtggtgagctgcacacccccaacctgctgccagctgcaccacgccgaggcctcctgctgccgcccatcctactgtggacagtcctgctgccgcccagtctgctgctgctactcctgtgagcccacctgctaaaagccagtttgctgattttcaacttgaaatttccactttcagttccattcatgaacgaattatttcttcaagcacttatggacaacgaacaaattcttcaacctttctttgtctttcttatgggggttaccaaatattttggcctcagaattatctgattcctttcaattccagaaagaccttactcttctctctgaggacgccaaaatacaaatttgacccaagaaatgaaaaagccgatttaccttgaaactgagcctttgcaagcattgaagcccacgctctgagtctcagcgccgacgagaccatggaagagccatctgtccttctcaggacactcacttcctgtatcccaccgtcctgcaaattgcaccccctatgaaagaggaataatataccaaggtctaataaattttaactattggtgcaacaaaaaaaaaaaaaaaaa

SEQ ID NO: 327 - DNA, 903 bp, Homo sapiens
aataggcagccataattcagaaactcctccaagcaacccaaccttcagatcaactcctgacaccatggcctgctgtcagaccagcttctgtggatttcccagctgctccaccagtgggacctgcggctccagctgctgccagccaagctgctgtgagaccagctcctgccagccacgctgctgtgagaccagctgctgccagccaagctgctgccagaccagcttctgtggatttcctagcttctcaaccggtgggacttgtgactctagctgctgccagccaagctgctgtgaaactagctgctgccagccaagctgctaccagaccagctcctgcggaactggctgtggcattggtggtggcattggctatggccaggagggcagcagtggagctgtgagcacccgtatcaggtggtgccgcccagactgccgtgtggagggtacctgcctgcccccctgctgcgtggtgagctgcacacccccatcctgctgccagctgcaccacgccgaggcctcctgctgccgcccatcctactgtggacagtcctgttgccgcccagtctgctgctgctactgctctgagcccacttgttgaaaacctccttctgctggggatcctgataagatggcaccttaaaactagccaaattagaatcctaacaatcttctgaactccagtacctataactgggcttgcaacctctcatcacacagccacataaattccctaggaagtaaattcatttacaatggaagaccaaaaatttttcctagacctggttgtcagccaaagtcctacaatgtgaaaagagttagatactattttactataaatatcacctgaaatatttcaacagttattgggacttaaatttaataaaagttttcatctcttcaatg

SEQ ID NO: 328 - DNA, 615 bp, Homo sapiens
cgtgacctgcgtgccccgctgcacgcgccccatctgcgagccctgccgccgcccggtgtgctgcgacccctgctccctgcaggaaggctgctgccgccccatcacctgctgcccctcgtcgtgcacggctgtggtgtgcaggccctgctgctgggccaccacctgctgccagcctgtgtctgtgcagtccccctgctgccggcccccctgcggccagccgaccccttgcagcaccacctgcaggacctcctcctgctgagccaccacctgctgccagcctgtgtctgtgcagtccccctgcggccagccgaccccttgcagcaccacctgcaggacctcctcctgctgagcagcccgttatcacgaagggcccctcagaagatggccaggtccatcccgctgcccctcagggcttcaccgcagagcaatacacgtttccttgagaagcccatttctcatctcttcatactagctcacactatgcattgaagacaccttttcagaccaaccacagatgagaaatacttttcctaggactccagtctaactcctatatcatgttgtctgctttctaataaactcaatactcctaccataaaaaaaaaaaaaaaaaaa

SEQ ID NO: 329 - DNA, 812 bp, Homo sapiens
aatagcccaacccacaccagcctcagacaccaccatgaccggctcctgctgcggctccaccttgtcctccctgagctacgggggaggctgctgccagccctgctgctgccgcgacccctgctgctgccgccccgtgacctgccagaccaccgtgtgccgccccgtgacctgcgtgccccgctgcacgcgccccatctgcgagccctgccgccgcccggtgtgctgcgacccctgctccctgcaggaaggctgctgccgccccatcacctgctgcccctcgtcgtgcacggctgtggtgtgcaggccctgctgctgggccaccacctgctgccagcctgtgtctgtgcagtccccctgctgccggcctccctgcggccagccgaccccttgcagcaccacctgcaggacctcctcctgctgagaccccaatgcccccacagagcaatacactgaagcctaaacatctatctggtgtttttaaaaagttaaaagaaaaatagattttttttcacaaggtgacaatagtgatttttaccatctggatacagcctggtgtaagcagacgtccattaccaccctcacccacattttcaggtgtctacatcagccttagtcattatggatagtaaatcgacctttaagaattcctggggtggactttgcaaacacattctacaacctgatggtttttactgctcaaactgtcaccatcatcttttgcaatgtgttgctcactgttgtcaataaactaatttttcctggcaaaaaaaaaaaaaaaaaaaaaaaaaaaaaaaaaaaaaaaaaaaaaaaaa

SEQ ID NO: 330 - DNA, 601 bp, Homo sapiens
tgcttggtgagtgtggctacttccttgaaccacatggagacacattgtacaggaagaagtgcctccttctgctcgtcatctgcgattctcatctgacaccatggtcagcttctgttgtagctctgtctgctctgaatagagctgtggccaaggcctctgccagacctgctgctgctgcagttgctgccagaccacctactgcagaaccatctgctaccatcccagctgctctgtgtccagctgttgcaggcccccgtgctgccagtccctgtgctgccccagctgctgcatttctagccgctgccactcaagctgcagtgtgtccacctgctccaggcccagctgttataatccccagtactaccagccctcctgctgccacccttctgctgcacttctagctgctgccaccctggctgctgtgtgtccagctgctgctgtccagtctgctaccagaccacctgctgtggtccagtctcctatgaatcctcttgctgttgaacttcattcctgaccaccagccctggttcaaccaccttgttgtcagtgtaccagtcattctcattccccttctccactggacctggccttgccctgatcc

SEQ ID NO: 331 - DNA, 1202 bp, Homo sapiens
cttcactctcttgaaaacccacccagatcctccccgttctgacaccatggtcagctcctgttgtggctccgtgtgctctgaccagggctgcggccaagtcctctgtcaggagacctgctgccgccccagctgctgtcagaccacctgttgcaggaccacctgctaccgccccagctgttgtgtgtccagctgctgcaggccccagtgctgccagtctgtgtgctgccaacccacctgctgtcgccccagctgctgtgagacgacctgctgccaccctaggtgctgcatctccagctgctgccgccccagctgctgtatgtccagctgctgcaagccccagtgctgccagtctgtgtgctgccagcccacctgctgccgccccagctgctgcatctccagctgctgtcgccccagctgctgtgtgtccaggtgctgcaggccccagtgctgccagtctgtgtgctgccagccaacctgctgccgtcccagctgctgcatctccagctgctgccgcccctcttgctgtgaatccagctgctgccgcccatgctgctgccgcccctgctgctgcctgcgtccagtctgtggccgagtctcctgccacaccacttgctatcgcccaacctgtgtcatctccacctgtccccgccccttgtgctgtgcctcctcttgctgctgagcccactgccctggctcacgtcccccttcaccactggcccacagatgtagacccttctactgtgctgaccattaggatacatgaagtggggttgatgtcattcaataggatggaccttatgcttccaaagagcccaccaccatttcactgactctgtgagaacattctggttcattttaaactccctcccttgctttctttttcttctggtggtggcaccaaatgtgaattaatttgtaatacactagctaagaaattattccaatcttctgatttccttattttctttatcactttaaggtacagattctccttctcagtgaggtagatattatctgcaggaccagttttgtcactgatgttgcaccctcagatccagccacccaattgtattctgtgtttctcctagggtgaatttcttatgctttgttgcatctctgctttctaataaacttttctgcacttaagaaaaaaaaaaaaaaaaaaaaaaaaaaaaaaaaaaaaaaaaaaaaaaaaaaaaaaa

SEQ ID NO: 332 - DNA, 1219 bp, Homo sapiens
ttcactctcctagaaacccaactagatccttcaccctctgacaccatggtaaactcctgttgtggctccgtgtgctctcaccaaggctgtggccaagacctctgccaggagacctgctgccgccccagctgctgtgagaccacctgctgcaggaccacctactgtcgccccagctgctgtgtgtccagctgctgcaggccccagtgctgccagtctgtgtgctgccagcccacctgctgccgccccagatgctgcatctccagctgctgtcgccccagctgctgtgtgtccagctgctgcaagccccagtgctgccagtctatgtgctgccagcccacttgctgccgccccagatgctgcatctccagctgctgtcgccccagctgctgtgtgtccagctgctgcagaccccagtgctgccagtctgtgtgctgccagcccacctgctgccaccccagctgcagcatctccagctgctgccgcccctcttgctgtgaatccagctgctgccgcccctgctgctgcctgcgtccagtctgtggcggagtctcctgccacaccacttgctatcgcccaacctgtgtcatctccagctgcccccgccccttgtgctgtgcctcctcttgctgctgagcccactgccctggctcatctctcccttcactgcaggcccacagttgtagaccattcttctgtgctgactattaggacacatggagtgggattgatgtcattcagcagggtggacttcatgtttccaatgagcccatcaccatcccactgactctgtgagaacattctggttcattttaaactccctcccttgctttctttctcttccagtcatggcaccaaatatgaaataatttgtaatccactagctaagaaattattccaatcctctaaattcctcattttttaaatcgttttgagcctacagaatatccttcccagtgaggtacacattatctccatttcaaacatattatttgtctgtcagcctttcagtcattcttttctcttggaaaggtaggaggctgcccctcccatgctctcctgctttctccctgttctctctttgtctctgtttgttcaagtttgccagaatttttctattttattggttctttatctttattgtgttcacaaaatatattgtattaaacttttcatttagaaaaaaaaaaaaaaaaaaaaaaaaaaaaaaaaaaaaaaaaaa

SEQ ID NO: 333 - DNA, 1077 bp, Homo sapiens
ctcactctcctggaaacccaccgagaacctccaccctctgacaccatggtcaactcctgttgtggctctgtgtgctctgaccagggctgtggcctggagaactgctgccgccccagctgctgccagaccacctgctgcaggaccacctgctgccgccccagctgctgtgtgtccagctgctgcaggccccagtgctgccagtctgtgtgctgtcagcccacctgctgccgccccagctgctgtcagaccacctgctgtaggaccacctgctgccgccccagctgctgtgtgtccagctgctgcagaccccagtgctgccagtctgtgtgctgccagcccacctgctgccgccccagctgctgtcagaccacctgctgcaggaccacttgctgccgccccagctgctgtgtgtccagctgctgcagaccccagtgctgccagtctgtgtgctgccagcccacctgctgccgccccagctgctgcatctccagcagctgctgcccctcttgctgtgaatccagctgctgccgcccctgctgctgcctgcgtccagtctgtggccgagtctcctgccacaccacttgctatcgcccaacctgtgtcatctccacctgcccccgccccttgtgctgtgcctcctcttgctgctaaatctctgctgtgaacacaccacttccttattacgtcctttcctacagatgaaggctctcattgcaaacatgcggactgttcaagagaattgatctgggtcccataagcaaacctcatccttagaaattctgtatttgcattctaccttttgtccaaactcccttccttccaaaggaattcattgacaatctcctaataaattgacaaattgtcctccaacatcctcccacctctttgacttcaggacatttattcatcatgcctaaggaatttgaagattgcctccatcatttgtagggccacagatcttaaagcctccaaccttgaagtccagtgaagtctctctcttaaagtcttttgcaaacatttttgtaccttgttatttccatgtaccaaaataaacctctattctattggcactgaaaa

SEQ ID NO: 334 - DNA, 942 bp, Homo sapiens
tagaaatccacccagaacctccaccctctgacaccatggtcagctcctgttgtggctctgtcagctctgagcagagctgtggcctggagaactgctgccgccccagctgctgccagaccacctgctgcaggaccacctgctgccgccccagctgctgcaagccccagtgctgccagtctgtgtgctaccagcccacctgctgccaccctagctgctgcatctccagctgctgccacccctattgctgtgaatccagctgctgccgcccctgctgctgccgccccagctgctgccagaccacctgctgcaggaccacctgctgcaggaccacctgctgctgccccagctgctgtgtgtccagctgctgcagaccccagtgctgccagtctgtgtgctgccagcccacttgctgccgtcccagctgctgcatctccagctgctgccacccctcttgctgtgaatccagctgctgccgcccctgctgctgcgtgcgtccagtctgtggccgagtctcctgccacaccacttgctatcgcccaacctgtgtcatctccacctgcccccgccccttgtgctgtgcctcctcttgctgctaatgtctccttgtgatatttgtcatactatgaatgtcttcattagtcatttaaaatgcactgtagccagccagtcactggaaaaatgaacacttccctgccagtttgtctcatgtggcattcagagtggacattcagctcttctaggaaatgacagacaatcacattcattaaaatatgttatgccaggccccaatgcagttatttttagatgagcagtgtcttcattcgaaggggacactaactgtgatgatctcatataatattgttttcatgtattaataaacagccacttccctaaaaaaaaaaaaaaaaaaaaaaaaaaaaaaaaaaaaaaaaaaaaaaaaaa

SEQ ID NO: 335 - DNA, 924 bp, Homo sapiens
ctccttcctggaaacccacccagaacctccaccctctgacaccatggtcaactcctgttgtggctctgtgtgctctgaccagggctgtggcctagagaactgctgccgtcccagctactgccagaccacctgctgcaggaccacctgctgccgccccagctgctgccgccccagctgctgcaggccccagtgctgccagtctgtgtgctgccagcccacctgctgctgccccagctactgtgtgtccagctgctgcagaccccagtgctgccagaccacccgctgcagaaccacctgctgccgccccagctgctgtgtgtccaggtgctacaggccccattgtggccagtctctatgctgctagcccatctgctggcaaaccacctgctacaggaccacctgctgccaccccagctattgcatttccagctgctgccagccttcctgcagtatctctagcagcagtagctcctcctgctgtggcttcagctgctgcaggctctcctgctgcatctccagttgctgccgccccaactgctgccagaccatgtgctgccgcccaacctgctctagtgcttcttgctgctgaggctgtcatctggactcaccagattctcatcaaccagcattcttgatgtagctcatctatgagctgagttatgggaagctagttggaaaacttcagttccaaccaattcttagattgaatctggcctccaaatatatgctccccccacattttacctctctaccaaatgaacataagttgaatttgctctgaaatctgtcaactatcttaattgaaatatttgctctctgccataatttctcatatggagctattccattttaaacaaatatttatctaaataaatcttaaataaattttcaggcatagaaataaaaaaaaaaaaaaaaaaaaaa

SEQ ID NO: 336 - DNA, 1099 bp, Homo sapiens
cttcctggaaacccacccagaacctccaccctctgacaccatggtcaactcctgttgtggctctgtgtgctctgaccagggctgtggcctagagaactgctgccgtcccagctactgccagaccacctgctgcaggaccacctgctgccgccccagctgctgtgtgtccagctgctgcagaccccagtgctgccagaccacctgctgcaggaccacctgctgccaccccagctgctgtgtgtccagctgctgcagaccccagtgctgccagtctgtgtgctgccagcccacctgctgcagaccccaatgctgccagactacctgctgtaggaccacctgctgccgccccagctgctgcaggccccagtgctgccagtctgtgtgctgccagcccacctgctgctgccccagctactgtgtgtccagctgctgcagaccccagtgctgccagaccacctgctgcagaaccacctgctgccgccccagctgctgtgtgtccaggtgctacaggccccattgtggccagtctctatgctgctagcccatctgctggcaaaccacctgctacaggaccacctgctgccaccccagctattgcatttccagctgctgccagccttcctgcagtatctctagcagcagtagctcctcctgctgtggcttcagctgctgcaggctctcctgctgcatctccagttgctgccgccccaactgctgccagaccatgtgctgccgcccaacctgctctagtgcttcttgctgctgaggctgtcatctggactcaccagattctcatcaaccagcattcttgatgtagctcatctatgagctgagttatgggaagctagttggaaaacttcagttccaaccaattcttagattgaatctggcctccaaatatatgctccccccacattttacctctctaccaaatgaacataagttgtaatttgctctgaaatctgtcaactatcttaattgaaatatttgctctctgccataatttctcatatggagctattccattttaaacaaatatttatctaaataaatcttaaataaattttcaggcatagaaaaaaaaaaaaaaaaaaaaaaa

SEQ ID NO: 337 - DNA, 782 bp, Homo sapiens
ccaccttcctggaaatccacccagaacctccaccctctgacaccatggtcaactcctgttgtggctctgtgtgctctgaccagggctgtggcctagagaactgctgccgtcccagctgctgccagaccacctgctgcaggaccacctgctgccgccccagctgctgtgtgtccagctgctgcagaccgcagtgctgccagtctgtgtgctgccagcccacctgctgcagccccagctgctgccagaccacttgctgcaggaccacctgctgccgtcccagctgctgtgtgtccagctgcttcagaccccagtgctgccagtctgtgtgctgccagcccacctgctgccgccccagctgtggccagaccacctgctgcaggaccacctgctaccgccccagctgctgtgtgtccacctgctgccgcccaacctgctctagtggctcttgctgctgatgccctcacctatactcacctgcctttattaaccagcattcttgatatgatccacctgtgaactgaatcatgcaaggccaattggacaacctcagttccaaccaattcttggattgagtttggcctccaaatatgctcaccaaacactatgttgctaccctctaccaaatgaatacaagtttgaattttctctgaaatatgtcaaccccatgttccctgaattgaaatatttgctctctaccataatttatcacatggagctattcctctatcttaaataaattttaatttttgaggcatgcaaataaaaaaaaaaaaaaaaaaaaa

SEQ ID NO: 338 - DNA, 754 bp, Homo sapiens
ctgtcttggaaacctacctagaacctccaccctctgacaccatggttaactcttgttgtggctctgtctgctctgaccagggctgtgatcaaggcctctgccaagagacctgctgccgccccagctgctgccagaccacctgttgctgccccagctgtgttgtatccagctgctgccgcccatcctgctctcagactacctgctgccagaccacttgctgtcgccccagctgctgccgcccagtctgttgtcagaccacctgccgccccagctgtggtgtgtccagctgctgccgtccactctgttgtcagaccacctgccgccccagctgtggtgtgtccagctgctgccgtccactctgctgtcagaccacctgctgccgtacaacttgctgccgccccagctgctgtggatcctcttgttgaacctcatattggactatcaaccatgagccagtcaccatcccatgatatgaaagtgtcatttatatcaatttgtccatgtgttaaatggccatcagctttattatcctgttattccactaagtaactggtgaaagggcatccatctacatttaataccactcatttttcccatggatctcttcccagcattcagacctcagatgcatgatgcagttagactaagcctctaagtctctgactgttatgcttgatttgaccttcaaaattacatattaactgttcttcaataaatattatcttaatatcagtaaaaaaaaaaaaaaaaaaaa

SEQ ID NO: 339 - DNA, 1042 bp, Homo sapiens
tgacaccatgacccactgttgctccccttgctgtcagcctacctgctgcaggaccacctgctgcaggaccacctgctggaagcccaccactgtgaccacctgcagcagcacaccctgctgccagcccgcctgctgtgtgtccagctgctgccagccttgctgccgcccaacttgctgtcaaaacacctgctgtaggaccacctgctgccagcccacctgtgtgaccagctgctgccagccttcctgctgcagcacaccctgctgccagcccacctgctgtgggtccagctgctgtggccaaaccagctgtgggtccagctgtggccagagcagctcctgtgcacctgtgtactgcagaagaacctgctactaccccacgactgtctgcctgcctggttgcctaaaccagagctgtggctccaactgctgccagccctgctgccgcccagcctgctgtgagaccacctgctgcaggaccacttgcttccagcccacctgtgtgtccagctgctgccagccttcttgctgctgatcacgttccaagagaaccaccatcctcacacaacaaatttctgctcaactgactcatcttttgggggactaatttaatttgctgctgacagccaccatgctctcacccaaatttttatgaattctctacatgtttaaaatcttggaaatctgcttgagggagggcagaatacttcatcctgattctctttttccttacaccttgtggatcatgtgccagcttcatctgttctcaagtttgagtcatggtctcagctttgactctaaagtcaagagcttcattccctgcttctaaggaatttaggtttctgcaactgatcgatgatctttgcaatcttttttttgttttcaatatcctcctcatcgttcttgtatccttctttcttcttttcatgataaatttgtgttgtgtccctggtagcagaaatccttacctatatgtttctgaataaattctgaaccatcctcatctcaaaaaaaaaaaaaaaaaaaaaaaaaaaaaaaaaaaaaa

SEQ ID NO: 340 - DNA, 1020 bp, Homo sapiens
tcacctcttaacagaagcccaccctccatccctgacaccatgacccactgttgctccccttgctgtcagcctacctgctgcaggaccacctgctggcagcccaccactgtgaccacctgcagcagcacaccctgctgtcagccctcctgctgtgtttccagctgctgccagccttgctgccacccaacttgctgtcaaaacacctgctgtaggaccacctgctgccagcccatctgtgtgaccagctgctgccagccttcctgctgtagcacaccctgctgccagcccacatgctgtgggtccagctgtggtcagagcagctcctgtgcacctgtgtactgcagaagaacctgctaccaccccacaagtgtttgtctgcctggttgcctaaaccagagctgtggctccaactgctgccagccctgctgccgcccagcctgctgtgagaccacctgctgcaggaccacttgtttccagcccacctgtgtgtacagctgctgccagccttcttgctgctaatcaactcccaagagaactaccatcctcacacaacaaccttcagctcaactgacttgtcttttgagggactaatttactttgctgctgacagccaccatgctctcacccaaatttttatgaattctctacatgtttaaaatcttgggaatctgcttgagggagggcagaatacttcatcctcattccctctttccttacaccttgtggatcatgtgccagcttcgtctgttcttaatttggagtcatgatctcagctttgtctcaaaaatcaagagcttcattctttgcttctaaggaatttaggtttctgcaactgatcaatcatctttgcaattatattttcattttaaatatccttctcatggttcttgtatccttctttcttcttttcacgataactttgggttatgtctctggtagcagagattcttacctatatgtttctgaataaactctgaaccatcttcatctcaaaaaaaaaaaaaaaaaaaaaaaaaaaaa

SEQ ID NO: 341 - DNA, 1007 bp, Homo sapiens
tctgaacagaactccaccctctacccctgacaccatgacccactgttgttccccttgctgtcagcctacgtgctgcaggaccacctgctggaagcccaccactgtgaccacctgcagcagcacaccctgctgccagccctcctgctgtgtgtccagctgctgccagccttgctgccgcccaacttgctgtcaaaacacctgctgccagcccatctgtgtgaccagctgctgccagccttcctgctgcagcacaccctgctgtcagcccacctgctgtggccaaaccagctgtgggtccagctgtggtcagagcagctcctgtgcacctgtgtactgcagaagaacctgctaccaccccacgactgtctgcctgcctggttgcctaaaccagagctgtggctccagctgctgccagccctgctgccgcccagcctgctgtgagaccacctgctgcaggacaacttgcttccagcccacctgtgtgtacagctgctgccagccttcttgctgctgatcaagtcccaagagaaccaccatactcacacaacaaatttctgctcaactgactcatcttttgggggactaatttaatttgctgctgacagccaccatgctttcacccaaatttttatgaattctctgcatgtttaaaatcttgtgaatcagcctgagggagggcagaatacttcatcttgattctctttttccttacaccttgtggatcatgtgccagcttcgtctgttctcaatttggaatcatgatctcaactttgactcaaaagtcaagaggttcattctctgcttctaaggaatataggtttctgcaaccgaccaataatttttgcaatcacatttttgttttcaatatcctcctcatggttcttgtattcttctttattcttttcatgataactttgagttatgtccttggtaacagagattcttacctatatatttctgaataaactcttaaccatcctcatctcaaaaaaaaaaaaaaaaaaaaa

SEQ ID NO: 342 - DNA, 953 bp, Homo sapiens
ccatgacccactgttgctccccttgctgtcagcctacctgctgcaggaccacctgctgcaggaccacctgctggaagcccaccactgtgaccacctgcagcagcacaccctgctgccagccctcctgctgtgtgtctagctgctgccagccttgctgccgcccagcttgctgtcaaaacacctgctgcaggaccacctgctgccagcccacctgtctgtccagctgctgtggccaaaccagctgtgggtccagctgtggccagagcagctcctgtgcacctgtgtactgcagaagaacctgctactacccgacgactgtctgcctgcctggttgcctcaaccagagctgtggatccagctgctgccagccctgctgccgccccgcctgctgtgagaccacctgctgcaggaccacttgcttccagcccacctgtgtgtccagctgctgccagccttcttgctgctgatcaagtcccaagagaacaaccatcttcacacaacaaccttctgctcaactgacttatcttttggaggactaatttaccttactgctgacagcaaccatgttctcacccaaatttttatgaattctctgcatatttaaaatcttgtgaatcagcttgagggagggcagaatacttcatcctgattctctttttcttataccttgtgaatcatgtgccagcttcatctgttctcaattttgagtcatggtctcagctttgactcaaaagtcaagagcttcattctcttcacttaagaaacttaagttgctgcaaatgattaagaatcttcacaactatgttttcttttcaatatactcatgattcttgtatcctgcttccttcttttaatgatcactttgggttatctccctataaccagggatcttacctatatatttcttaataaataaatttggaactattattcataaaaaaaaaaaaaaaaaa

SEQ ID NO: 343 - DNA, 990 bp, Homo sapiens
tctgaacagaagcccaccctctacccctgacaccatgacccactgttgctccccttgctgtcagcctacatgctgcaggaccacctgctgcaggaccacctgctggaagcccaccactgtgaccacctgcagcagcacaccctgctgccagccctcctgctgtgtttccagctgctgccagccttgctgccgcccaacttgctgtcaaaacacctgctgccagcccacctgtgtgaccagctgctgccagccttcctgctgcagcacaccctgctgccagcccacctgctgtgggtccagctgtgaccagagcagctcctgtgcacctgtgtactgcagaagaacctgctactaccccacaactgtctgcctgcctggttgcctaaaccagagctgtggctccaactgctgccagccctgctgccgcccagcctgctgtgagaccacttgcttccagcccacctgtgtgtccagctgctgtcagcctttttgctgctgatcaagtcccaagagaaccaccatcctcacacaacaactttctgctcaactgacttatcttttgggggactaatttaatttgctgctgacagccaccatgctctcacccaaatttttatgaattctctacctgtttaaaatcttgggaatctacttgagggagggcagaatacttcatcctgattctctttttccttacactttgtggatcatgtgccagcttcgtgtgttctcaattttgagtcatggtctcagctttgactcaaaagtcaagagcttcattctctgcttctaaggaatttaggtttctgcaactgatcaataatctttgcaatcatatttttgttttcaatatcctcctcatggttcttgtatccttctttcttcttttcataactttgggttatgtttctgctaccagcagagattcttagctatatgtttctgaataaactctgaaccatcctcaaaaaaaaaaaaaaaaaaaaaaaa

SEQ ID NO: 344 - DNA, 725 bp, Homo sapiens
actttggaggccaggtgtataaaaggtccagattgcaaggggtcatcagattctgggaaactcacctctgaacagaaacccaccctccacccctgacaccatgacccactgctgttccccttgctgtcagcctacatgctgcaggaccacctgctgcaggacaacctgctggaagcccaccactgtgaccacctgcagcagcacatcctgctgccagccctcctgctgtgtgtccagctgctgccagccttgctgccacccaacttgctgtcaaaacacctgctgcaggaccacctgctgccagcccacctgtgtgaccagctgctgccagccttcctgctgcagcacaccctgctaacagcccacctgctgtgggtccagctgctgtggccaaatcatctgtgggtccagctgctgccagcccagctcctgtgcacccatctactgcaggagaacctgctaccaccccacgagtgtctgcctgcctggttgcctaaatcagagctgtggctccagctgctgccagccctgctgccgcccagcctgctgtgagaccacctgctgcaggaccacttgcttccagcccacttctgtgatcagctgctgtcagccttcttgctgctgaccaactctccagaggaccaccatcctcacacagcaaccttctggcaaccttctgtcctcctcttggaggacaaatttactttcaaactttgctgacaacc

SEQ ID NO: 345 - DNA, 1230 bp, Homo sapiens
atgtctggcagttgctcttctaggaaatgcttctccgtgccagccacctctctctgctccactgaggtgagctgtggaggccccatctgcctgcccagttcctgccagagccagacatggcagctggtgacttgtcaagacagctgtggatcatccagctgtgggccacagtgccgtcagccctcctgtcctgtgagtagctgtgcccaacccctgtgctgtgatcctgtcatttgtgagccttcttgctccgtgagcagcggctgccaacccgtgtgctgtgaggccaccacctgtgagccttcttgctctgtgagcaactgctaccaacctgtgtgcttcgaggccaccatctgtgagccttcttgctcagtgagcaactgctgccaacctgtgtgctttgaggccaccgtttgtgagccttcttgttccgtgagcagctgtgctcaacctgtgtgctgtgagcctgctatttgtgagccttcttgctccgtgagcagctgctgccagcctgtaggctctgaagccacttcctgccaaccagtcctctgtgtgcccacttcctgccagcctgtcctctgcaaatccagctgctgccagccagttgtctgtgagcccagctgctgttcagctgtctgcaccctgcctagttcctgccaacctgtggtctgtgagccttcctgctgtcagccggtgtgcccgacacctacctgctctgtgaccagtagctgccaggctgtctgctgtgaccccagcccttggtcttctgcatctgccatctgccgaccaacttgtcctaggactttctacatacccagttccagcaaacggccttgcagtgctacgatttcctaccgcccggtctcccgtccgatctgccgcccaatctgctctggactcctcacctataggcagccatacatgacatccatctcctaccgtcctgcctgctatcgcccatgctactccatcctgcgccgcccagcctgtgtcacttcctactcttgccgcccagtctacttccgcccatcttgcactgagtctgactcttgcaaacgggattgcaaaaaatccacttccagccaactggattgtgttgacacaaccccctgcaaggtggatgtctcagaagaggctccctgccagcccactgaagccaaacccatcagcccaaccacccgtgaggccgcagcagctcagcctgctgccagcaagcctgccaactgctaa

SEQ ID NO: 346 - DNA, 815 bp, Homo sapiens
gaactccggctgcgttaccgacctgcgagctgacgggcccggaccatggggtgctgcccgggggactgcttcacctgctgcacccaggagcaaaactgctgtgaagagtgctgctgtcagccgggctgctgtggctgctgcggctcctgctgtggctgtgggggctctggctgcgggggctctggctgcgggggcagctgctgcggatcgtcttgctgtggatctggctgcggaggctgtggaggctgcggaggctgcgggggtggctgctgtggatccagttgctgtgggtccagttgctgcggctccgggtgctgtgggcctgtgtgctgccagcccacacctatatgcgacacaaaatgaagacctttccctccaccactgatgcagtcccaccgaaagcctccatctgctccagggggacagcccctcgtgtccagaaccttccatacccccaagacagtgtcttgtctttctgtgatttgtagaggagggcttgttctccaacaccttctctggtatttcaaggcaccgagaacaagagccatactctgatgaaacattaaaactcggtcacaactaagtgatcccaagctcaagggtgaatccccaatactttacttattcacatgaagttcaatgtcttgtactataagacatcctcttcttcaaggtgtctttgggactgatcctccgccctggctttctgcagctttgagatgcaaaaaaggtccatcttctttgtgagcctcttaataaatttgagcatgctggcataaaaaaaaaaaaaaaaaaaaaaaaaaaaaaaaaaaaaa

SEQ ID NO: 347 - DNA, 1252 bp, Homo sapiens
ggactctgtcttcagctggacactccctccctgcaccatgtcttacagttgtggcctgcccagcctgagctgccgcaccagctgctcctcccggccctgtgtgccccccagctgccacggctgcaccctgcccggggcctgcaacatccccgccaatgtgagcaactgcaactggttctgtgagggctccttcaatggcagtgagaaggagaccatgcagttcctgaacgaccgcctggccagctacctggagaaggtgcgtcagctggagcgggacaacgcggagctggagaacctcatccgggagcggtcacagcagcaggagcccttggtgtgtgccagctaccagtcctacttcaagaccattgaggagctccagcagaagatcctgtgcagcaagtctgagaatgccaggcttgtggtgcagatcgacaatgccaagctggcctcagatgacttcaggaccaaatatgagaccgagctgtccctgcggcagctggtggagtcggacatcaatggcctgcgcaggatcctggatgagctgaccctgtgcaggtctgacctggaggcccaggtggagtccctgaaggaggagctgctgtgcctcaagcagaaccatgagcaggaggttaacaccctgcgctgccagcttggagaccgcctcaacgtggaggtggacgctgctcccactgtggacctgaaccaggtcctgaatgagaccaggagtcagtatgaggccctggtggaaaccaaccgcagggaagtggagcaatggttcgccacgcagaccgaggagctgaacaagcaggtggtatccagctcggagcagctgcagtcctaccaggcggagatcatcgagctgagacgcacggtcaatgccctggagatcgagctgcaggcccagcacaacctgcgagactctctggaaaacacgctgacagagagcgaggcccgctacagctcccagctgtcccaggtgcagagactgatcaccaacgtggagtcccagctggcggagatccgcagtgacctggagcggcagaaccaggagtatcaggtgctgctggacgtgcgggcgcggctggagtgtgagatcaacacgtaccggagcctgctggagagcgaggactgcaagctcccctccaacccctgcgccacaaccaatgcatgtgacaagtccactgggccctgtatctctaatccctgtggcctacgtgctcggtgtgggccttgcaacacatttgggtactag

SEQ ID NO: 348 - DNA, 1621 bp, Homo sapiens
caggttttgaaactgacttccagagctccactgcctccctgcaccatgccctacaacttctgcctgcccagcctgagctgccgcaccagctgctcctcccggccctgtgtgccccccagctgccacggctacaccctgcccggggcctgcaacatccctgccaatgtgagcaactgcaactggttctgcgagggctccttcaatggcagcgagaaggagactatgcagttcctgaacgaccgcctggccagctacctggagaaggtgcgtcagctggagcgggacaacgcggagctggagaacctcatccgggagcggtctcagcagcaggagcccttgctgtgccccagctaccagtcctacttcaagaccattgaggagctccagcagaagatcctgtgcagcaagtctgagaatgccaggctggtggtgcagatcgacaatgccaagctggctgcagatgacttcagaaccaagtaccagacggagcagtccctgcggcagctggtggagtccgacatcaacagcctgcgcaggattctggatgagctgaccctgtgcaggtctgacctggaggcccagatggagtccctgaaggaggagctgctgtccctcaagcagaaccatgagcaggaagtcaacaccttgcgctgccagcttggagaccgcctcaacgtggaggtggacgctgctcccgctgtggacctgaaccaggtcctgaacgagaccaggaatcagtatgaggccctggtggaaaccaaccgcagggaagtggagcaatggttcgccacgcagaccgaggagctgaacaagcaggtggtatccagctcggagcagctgcagtcctaccaggcggagatcatcgagctgagacgcacagtcaatgccctggagatcgagctgcaggcccagcacaacctgcgatactctctggaaaacacgctgacagagagcgaggcccgctacagctcccagctgtcccaggtgcagagcctgatcaccaacgtggagtcccagctggcggagatccgcagtgacctggagcggcagaaccaggagtatcaggtgctgctggacgtgcgggcgcggctggagtgtgagatcaacacataccggagcctgctggagagcgaggactgcaagctgccctccaacccctgcgccaccaccaatgcatgtgaaaagcccattggatcctgtgtcaccaatccttgtggtcctcgttcccgctgtgggccttgcaacacctttgggtactagataccctggggccagcagaagtatagcatgaagacagaactaccatcggtgggccagttctgcctctctgacaaccatcagccaccggaccccaccccgaggcatcaccacaaatcatggtctggaaggagaacaaatgcccagcgtttgggtctgactctgagcctagggctacttgatcctcctcaccccaggtccctctcctgtagtcagtctgagttctgatggtcagaggttggagctgtgacagtggcatacgaggtgttttgttctctctgctgcttctacctttattgcagttccccaaatcgcctaataaactttcctcttgcaaagcagacaaaaaaaaaaaaaaaaaaaa

SEQ ID NO: 349 - DNA, 1713 bp, Homo sapiens
ggaaaggaaactatgctgtatgccaagcccccacccacaattaatggtataaaaggactgcagaggaaggagagactcaaacctgcccacatccacctccagcagcttacctgcttttccattacctgttccagcaccatgtcttacagttgttgcctgcccagcctgggctgccgcaccagctgctcctcccggccctgcgtgccccccagctgccacggctacaccctgcctggggcctgcaacatccccgccaatgtgagcaactgcaactggttctgtgagggctccttcaatggcagcgagaaggagactatgcagttcctgaacgaccgcctggccagctacctggagaaggtgcgtcagctggagcgggacaacgcggagctggagaaactcatccaggagcggtcccagcagcaggagcccttgctgtgccccagctaccagtcctacttcaagaccattgaggagctccagcagaagattctgtgtgccaaggctgagaatgccaggctggtggtgaacattgacaatgccaagctggcctctgacgacttcagaagcaagtaccagacggagcagtccctgaggctgttggtggagtcggacatcaacagcatacgcaggatcctggatgagctgaccctctgcaagtctgacctggagtcccaggtggagtccctgagggaggagctgatctgcttgaagaagaaccatgaggaggaggttaacaccctgcgctcccagcttggagaccgcctcaacgtggaggtggacactgcccccactgtggacctgaaccaggtcctgaacgagaccaggagtcagtatgaggctctggtggaaattaaccgcagggaagtggagcaatggttcgccacgcagaccgaggagctgaacaagcaggtggtatccagctcagagcagctgcagtcctgccaggcggagatcatcgagctgagacgcacagtcaacgccctggagatcgagctgcaggcccagcacaacctgcgagactctctggaaaacacgctgacggagagcgaggcccactacagctcccagctgtcccaggtgcagagcctgatcaccaacgtggagtctcagctggcagagatccgctgtgacctggagcggcagaaccaggagtaccaggtgctgctggacgtgcgtgcccggctggagtgtgagatcaacacgtaccggagcctcctggagagtgaggactgcaagctcccctgcaacccatgcgccaccaccaatgctagtggcaactcctgtggaccctgtggcacctctcaaaagggttgctgtaattgaaaagcttgtatcctctttgaagacatctacaaagccatttagatcaaccacaggaaggatcctcaagtcctgacttttctggagctcagctgacatcaagaaacctcatcttgcctctatgttatttctagaatgctgaaaagctttcctgacccaagcaaagacacacatcatcaacttccaatgtctggacaactccttcctgttgagggtcgagcctgtttgtttctaaagatgttcagctccctgtaatctgagctccagttactacttaaggtgtttcctgaacgtactactgcatttcctgttttccttttttctttggcattctctggaatgcaaggaggagacttcatttacttcccaataaacttcatttctctggcataa

SEQ ID NO: 350 - DNA, 1616 bp, Homo sapiens
gagaatttagactctgtcttcagccaggcactccctccctccctcccagcactatgccctacaacttctgcctgcccagcctgagctgccgcaccagctgctcctcccggccctgcgtgccccccagctgccacagctgcaccctgcccggggcctgcaacatccccgccaatgtgagcaactgcaactggttctgcgagggctccttcaatggtagcgagaaggagactatgcagttcctgaacgaccgcctggccagctacctggagaaagtgcgtcagctggagcgggacaacgcggagctggagaacctcatccgggagcggtctcagcagcaggagcccttgctgtgccccagttaccagtcctattttaagaccattgaggagctccagcagaagatcctgtgtaccaagtctgagaatgccaggcttgtggtgcagatcgacaacgccaagctggctgcggatgatttcagaaccaagtaccagaccgagctgtccctgcggcagctggtggagtcggacatcaacggtctgcgcaggatcctggatgagctgaccctgtgcaagtccgacctggaggcccaggtggagtccctgaaggaggagctgctctgcctcaagagcaaccatgagcaggaggtcaataccctgcgctgccagcttggagaccgcctcaatgtggaggtggatgctgctcccactgtggacctgaatcgggtgctgaacgagaccaggagtcagtatgaggccctggtggaaaccaaccgcagggaagtggagcaatggttcaccacgcagaccgaggagctgaacaagcaggtggtatccagctcagagcagctgcagtcctaccaggcggagatcatcgagctgagacgcacagtcaacgccctggagatcgagctgcaggcccagcacaacctgcgagactctctggaaaacacgctgacagagagtgaggcccgctacagctcccagctgtcccaggtgcagagcctgatcaccaacgtggagtcccagctggcggagatccgcagtgacctggagcggcagaaccaggagtaccaggtgctgctggatgtgcgtgcccggctggagtgtgagatcaacacataccggagcctgctggagagcgaggactgcaatctgcccagcaatccctgtgccacgaccaacgcgtgcagcaagcccatcggaccctgtctctccaatccctgtacctcttgtgtccctcctgccccctgcacaccctgtgccccacgcccccgctgtgggccctgcaattccttcgtgcgctagaacctagggaatgccagaggagcaaggatgcagggcccaggactccagagctgtgacctggctctggttcaacaaaaggggcctgaaaacatcatttgcatggctggagttgcccgcgtaaggcagccaagaaactcacccaaagcctgtagcctccccaactactccagactgtcctgctcaccctttccttcctgggggtctgttccttcctatgctcacccagagaactctctgatgtgccagtgggcctcccttttaacctcctaataaatatcatttccttggcaaaaaaaaaaaaaaaaaaaaaaa

SEQ ID NO: 351 - DNA, 6673 bp, Homo sapiens
aagaccatggtcctggtatttaagacttttcacaacctggactcaatgcaactttccggggcttggggataatgtctccattataaataccaacacaactagactattttccattttccaaatgtttgattgtgtttattttgttctctatgagagaagctcattccccaaccctttataaaaaatatcattcaaaacatatttggaaaatcccctactccatgaagtctttttccggtctctcagtgagctctcttccacctcgaaatctttgcagctgtcttttaaaaaaaaaaaatacttccttttactgtcttcataatatcaagatcatttacttttttatctttcttattaaaatctaaaatctccttcttacaagacagcatagatgtgcgtttgttccgcactgggcactctacaaatatctatcaaaacaaacaaatcatgatttttccctttcttcaatgtgcctgattgactaatattttaggttttgctgcattgggaacattcagaggtaggaaaagaatgtgggagtgagagagacttgcaggacattttaggagcctttagttcttgattatttcatagacataagctgacagaaggggaaagatttcacagccacagaaagtgggctgcttgaagaagaccttgttttctctgttttccaggaccctgcagtgatgggaagaaagaggttagggcctctttcatgagctcattaactctttataggaaacaaaaaccactgactaatagagtgattgtataacaattgacataaatattaatgaggaaaatgccagttttcttgcaccaacacccactaaggcttatataaggtctacaggagaaggaagattttggtgtcaagcagatccaactgtgggcaaagcaggatcttgccttttagcaccatgacttctgaccattgcagttccctcctcagcgggcaggtttcagaggccaacgctgcctctctgtgcctcttggctaatgtggcacatgccaatcgagtccgtgtggggtcgactcccctgggccgcctcagcctctgtctgcccccaacctgccacaccacttgtcccttgccagggacctgccacattcctggcaacatcggaatctgtggggcctaccgcgaaaacaccctgaacggccacgagaaggagaccatgcagttcctaaacgaccgcctggccaactacctggagaaggtgcgccagctggagtgggacaatgcagaactggagaccaaactccatgagaggagcaagtgccacgagtccagcgtgtgccgaaactaccagtcctacttctgcaccatccaggagctccagcagaaggtgaggtttgcggtgcaccagatcaggggtcaggaatctgcttactgcctgtcggccaaatccggcccaccacctgcttttgcaaataaagttttattggttcatggccatgctcatgcatttgtatgttgtctgcagctgcttttgtactacagtggcagagttcagtcattgtaatggagactgtagggtctgcaaagcctaaagtatttactatctgaccctttacaaaaaaagattactgaccctgggtcagcagtggattttttttttcttttaatgtgggaagagaatctcttgagtgaaggtgaatgggaatttgtaaaggatgagatgtagaatttatcactctaggattctgagttcatgcttacttaacttcagcacataaaattcctaaatcgtagtcacaaaaatcatgctattttcatgaaaaccatgcaaaaaccgtgctgagtttatgaaagttgcagtatactgaaactttctggtgcagtaaacagggcaaaaggaatatttcctaacatccttgccaaggcagtgtctatccacacaacagcatcaaccttcttatgcatattctattgtcacctttgattatccagttaaagcttttgaagagcctacattcttagttttggagacaagaagacaaggaatgtcaaaataggggttacagaaacctggctagattcagagaagacctgtggggaggttggacaaccagaggaaagattctttctttagaacagatcctactttatctaaaacattcatagccagtcctctgttctgtggcctagtttttttttttttttttttgagacaaagtctcgctctgtcacccaggctggagtgcagtggtgcaatctcagctcactgcaaactctgcctcccaggttcaagtgattctcatgtctcagcttcctgagtagctgggattacaagtgtgcgccaccactcctagctaacttttatatttttagtagagatggtgtttcaccatgttgcccaggctggtcttgaactcctgacctcaggtgatccatctgccttggtctcccaaagtgcggggattacaggcatgagccactgcgtccggccagatcttcttatttatattgggctaagcatcatatctggcaaaatgaaagcaagtctttgttatatgttcagtttgctactgtcttccatctcctggttcctttgactctatgtcttcatccttttccaagaagtctcttgcacatcttccttcccacaccacaaaagcatctcttgcacgtttgggagtttgtgttgtccaggcggatgctgtaggttcaacttcagccaataaaacttcctctcacctgaggctataggtgtctctgggatcagtaagtcacttactgagcctactttcttaccccagattctgtgcaccaaatcggagaacaataggctggttgtgcaaatagacaatgccaaattggctgcagatgacttcaggaccaagtgagttggggttggacagggatgggaaggagccaagtgagagttggggttggatggggatgggacaatgccaagttggctgcttctgtctcatgtggcatcggatgtcattgacccagaccccaacccagtagttatagcagaagagaacaaagggcattaagctcaagatcctgaaaaactatccgctctccagtggtttagcattaacagtttacaacatgtgctagaatgcatcatccacctggtaagcaacttgtgaagcaggcgggcagggatagaatctcctccacaggtggggaccctgaggcttggggtgctggtgtgacttgccagaagccatgtgggtaccgagtggcagagctgggacttggccttaaattttgtaccaaattttcctttcttgaagcaatttcctgtgaaactgttgccttaataaggatatgtttctgtgctgcagcttgattaatttgtgagtgctgataattcatagcagaaatcatgctccatagcctaagatgaaaacatgtgaaagtcaaagggttgacaccacctgaggagggtctaccctgggtgctggaagggcattgtgttttatcatctttcttcggggcactgtgcaagtctcactcttctagagctaaagaaagccatttccttcctctcatgctggcaatgtggcttttactctaatagggaatccagggtccctttgggtatggggcttgtagagaggggcctgcagtgattgcactgtgttgcaaatgcctggttactttgccacctcccttttgggccattgtgtgtaaaggcaggtgctggctgtgtgtccatcacagtatcctcagtaccagctgctccccttggttcatctcaggtgcttagtattgactgagtggggaacatcctgttgctttctgggctttgagcacactacacaggataagccaactcacaattagatggcaaagggcaggccagtggacttacagctgcgagctgggagtcatgtcctggtgccccttcctgccctctaactgtcactcctgcactttccctgttacaggtacgagagagagcgctcgctgcaacagctggtggaggctgacatctgtggcctgcgcagggtgctagacaacctcaccctcgccaagtgtgacctggaggcccagctggagtccctgaaggaggagctgctttgcctcaagaagaaccatgagcaggtgtgtgacccttggtgtgatgcattgagactttctggaggtgaattcaggctcatctggggggaaaaaacggaggcttccttctgcttgggattgaagctttgcaggtgagctctggcttttggtgggagattgcttctcatccacagcttctggaagctgctaggctggtgcaggcagcggtttatcttcagaggagcacagggaaattactggggaggatggaaagtgggagttgagagtttgggtgaagggcagttgggggccctgcaggcgggtcatactcctctgatgcctacaggaagcccacactctaaggggtcagctgggagacaagctccggatagagctggacattgagcccaccattgacctgagtagagttctgggggagacgtgaggccagtacgaggccatggtggagaccaatcgccaggatgtggagcagtggttccaagcccaggtgagggggactgctaagcagtggggattggcctccatctgggcaggtaggtgaccatgtttctctatgctccagtctgaaggcatcagcctgcaggccatgtcctgctctgaggagctgcagtgctgccagtcagagatcctggagttgagacgctcggtgaacgccctggaggtggagcttcaggctcagcacacactggtgagtccctctgcacgcatgggagacccagcttggctcccactacccatgagtagctctctggggtcagtacaggcctcgaataccaaccacggactcagcttaaaccttggtttcaactcttttggaagcacttccctgtagatgtggatgctgagtgaatcaacattaacttaggtcagagggctctgatcttaaaggtctaccatgaagtgtgttagttattctggctgaagacagctaaagggagttagattgctctctggacctggcaatgtcttggggtgtcacaatcttaagaggttggagatccatgatttttaacttgcttcctcctttctttgatattatagaaggactgtctacagaactccctgtgtgaagccgaggaccgctaccgcacagagctggcccagatgcagagcctcatcaacaatgtggaggaacagctgtctgagatccgggctgacctggagcggcagaaccaggagtaccaggtgctgctggatgtgaaggcccggctgcagaatgagattgccacataccggaaccttctggagagtgaggactgcaagtacgtaccctgttgtctatgtcaacaccgtgtgcaaaaacagataacttctcttgggaatgacctaaaaggagctctggaggccaggtgggggtggcattgcagatcccatctttggagacaaacttgctaccactaggcctggtgagctaatgcctgcctaggcgtaggtgagggtgtacaggagttttcaggtcatggcatttgttttgctgaccacgttgtgctcccagttgctggctactcccatagagggctaaaatactgaatgcccagcacattcaggttttgctaaattctctccaggagaagtattccaataacgagtattctttgtgctcatagcatttaaagtattgctaagggcatgtgcactgactctttcattttagttccacaatagccctgtgaaaagcatcagagggctgatatacccctttaagcactaaggaacactatgaggggctgtgtttaaatggaatcagtggctgacatctggaccattcttgttcctctggcctttctgcctttctctctgctgtgttccttccatatgggacgtgaccctggcctggcacacaggtacactgagttctggccccagctccactgtggactgtgggcacgtcattgcccctttcaggcttagagggacctctaaggtctaaggtcctcttttgcactttaattctaaagtgtctataatatacttttgtctttcacatacttctcatgccaatgtttcaaacaccttttttctctatgcagatttccctgcaacccgtgtgcaaccccagccttcagcactcctagtccagcccctgcagcctgcgccccctgctcccgggccacccatgggccctgctcatcaactggatactgacacactcctcagcccgaggtgctgggaaaggggaggtgtcttcagctcgttaggctttgctctgcaggcctgctaacctgggccttgcctccctggccagccaggcaggagactgaagagagacagtgccactctgtggataggtgtttgaatccagcagctcagcccctatggctggatttgtttcttcccctcaaggtgtcccaagtgctccattttctctcttctgttgcctcctgatctctctgagatggggcaggcacttttgtttttattttgctattaaacttcgcttctgcagcagaatgagcccagtgcagtccagcctcagcatctccgtcccatgctgagagccttgctgggaactccttgagccacatgcttctgtagacgggggttgtggctggctcgccagagtggttctgggagatggcaaagccagtgaaggctagagttaaaaatgggactgcggccaaagtg

SEQ ID NO: 352 - DNA, 1986 bp, Homo sapiens
tggggcctgaatcaactgctggtgtttgttgagcagaaacagtgagtctctgacttcccaccaacagctaacctgatatggaagagccaagaggcatctcagatttgtcaacattgctttaatgagctgaggaacttctcatggtaaactcagcagctgagtaacaggatgatggcaccacaacaggtagataatcaaggcaggaggtcaaagcactggagccaacacccgcccaggatggggtataaaagggttgggaggagaggaggcttcagtctcagtggctcagccttcccagctgatctgaagctcctgtgcagcctcagccctacaccatgacctccttctacagcacctcctcatgccctctgggttgcaccatggctcctggagcaagaaatgtctttgtctctcctatcgatgttgggtgccagcctgtggcagaggccaatgctgcctccatgtgcctcttggccaacgtggcacacgccaacagagtccgtgtggggtcgactcccctgggccgccccagcctctgtctgcccccaaccagtcacactgcttgtcccttgccagggacctgtcacattcccggcaacatcggaatctgtggggcctacggcaaaaacaccctgaatggccatgagaaggagaccatgaagttcctgaatgaccgcctggccaactacctggagaaggtgcgccagctggagcaggagaatgcagagctggagaccacactcctcgagaggagcaagtgccacgagtccaccgtgtgccccgactaccagtcctacttccgtacaatcgaggagctccagcagaagatcctgtgcagcaaggctgagaatgccaggctgattgtacaaattgacaacgcgaagctggctgctgatgactttaggatcaagctggagagtgagcgctcccttcaccagctggtggaggcggacaagtgcgggacgcagaagctcctggatgacgcgaccctggccaaggccgacctggaggcccagcaggagtccctgaaggaggagcagctctccctcaagagcaaccacgagcaggaagtaaagattctgaggagtcagctgggggagaagttccggatcgagctggacattgagcccaccattgacctgaacagggtgttgggggagatgcgggctcagtacgaggccatggtggagaccaaccaccaggatgtggaacagtggttccaagcccagtctgaaggcatcagcctgcaggccatgtcctgctccgaggagctgcagtgctgccagtcggagatcctggagctgagatgcacggtgaatgccctggaggtggagcgccaagcccagcacaccttgaaggactgtctgcagaactccctgtgtgaagcggaggaccgctacggcacagagctggcccagatgcagagcctcattagcaacttggaagagcagttgtctgagatccgggccgacctggagcggcagaaccaggagtaccaggtgctgctggacgtgaaggcccggttggagaacgagattgccacataccggaaccttactcccctgcaatccctgttccacgcctgcctcctgtacttcttgtccaagctgtggccctgtcaccggtgggtctccctctggccatggagccagcatggggagatgattctgaaggcccgagttaggagattgaggctggttgcactggggtcaggagtgccctcaccttgcccagtcttccttcaagactagactcactgaggcattttccctaaatcaaccggtagcagatacttccaaggagtggctccctgcctatgcctctaagctgtattttttgttgttgctaaaatgttgtaattatcttccatgaaagcaattatttttcctggtgtctcttcttggtacttttagttctattccagtgtttcagaatctccaaaaatgtaactgggttccctgcattaaatggtcaataaacctcctt

SEQ ID NO: 353 - DNA, 2837 bp, Homo sapiens
tagtcctcctgctacaccactgaccaacaggaaagtttgtgtctccagagtggacacatccataaagaggccaaacccagtcaaggtctaagcatctgatggctataactttgcttctttgaaagataataaaaagcttctgacctcccatcaacagccaacctgatttcaaagagccaagaggcctcagattcgtcaacattcctttaacgagctgagaaacttttcatggtaaactcagcagctgagtaacaggatgatggcaccacaacaggtagataatcaaggcaggaggtcaaagcattggagccaacacccgcccaggatggggtataaaagggctgggaggagaggaggcttcagtctcagtggttcagctttcccagctgatctgaagctcctgtgcagcctcagcccaacaccatgacctcttcctacagcagctcctcatgccctctgggttgcaccatggctcctggagcaagaaatgtctctgtctctcccatcgacattgggtgccagcctggggcagaggccaacattgcccccatgtgccttttggccaacgtggcacatgccaaccgagtccgtgtggggtccactcccctgggccgccccagcctctgtctgccgcctacctgccacactgcttgtcccttgccagggacctgccacattcctggcaacattggaatctgtggggcctatggtgaaaacaccctgaatggccatgagaaggagaccatgcagttcctgaatgaccgcctggccaactacctggagaaggtgcgccagctggagcaggagaatgcggagctggaggccacactcctcgagaggagcaagtgccacgagtccaccgtgtgccccgactaccagtcttacttccacaccatcgaggagctccaacagaagatcctgtgcagcaaggccgagaatgccaggctgattgtacaaattgacaatgccaagctggctgccgatgactttaggatcaagctggagagtgagcgctccctgcgccagctggtggaggcagacaagtgtgggacacagaagctcctggatgatgcgaccctggccaaggccgacctggaggcccagcaggagtccctgaaggaggagcagctctccctcaagagcaaccacgagcaggaagtaaagattctgaggagtcagctgggggagaagctccggattgagctggacattgagcccaccattgacctgaacagggtgctgggggagatgcgggctcagtatgaggccatgttggagaccaaccgccaggatgtggaacagtggttccaagcccagtctgaaggcatcagcctgcaggacatgtcctgctccgaggagctgcagtgctgccagtcggagatcctggagctgagatgcacggtgaatgccctggaggtggagcgccaagcccagcacaccttgaaggactgtctgcagaactccctgtgtgaagccgaggaccgcttcggcacggagctggcccagatgcagagcctcatcagcaacgtggaggagcagctgtctgagatccgggccgacctggagcggcaaaaccaggagtaccaggtgctgctggacgtgaagacccggctggagaatgagattgccacgtaccggaaccttctggaaagcgaggactgcaaactcccctgcaatccgtgctccacgtctccctcctgcgtgactgccccctgtgctcctcgcccaagctgtggcccctgcaccacctgtgggcccacctgtggagccagcaccaccggaagccgattctgaattcctgtggacccacaggggctggctaaggcgagggatacccaaagagagatgcttgttatacctttagaaaatctggcttctaactttctgtatgtataggcctgtccaaaggctatgagataccagggacagtggaatcttgatggaaatccttcctttcctgctcttggttttcccaggtgagctctatgccctcagtggctggattgcagccacccatggtggctcagaatatctggattggagaggcataaggttgaaaagcattttggagtaggaacacggcatgatttaaaattgcacttgcacttcaagaacaccaactttaacttgaaatttttatagtttatgacaaaggaagtgaagaacagacttcactgtctgagatttcccacatttcttgggttgtttctaacattggcagcctggattatggccctagggagagggaaatagaatcagaattgtacctgaccctgtcttttctaattcccttctcctatcctcctgcctccctatcttggaaactgattaagtggaaactttccttgtatcaaatcctgagttttctctacttcagggtttctagctttgacaaaggaccaggcttgccttttctgtggcaacacagcctcttacatatggcttccatagcttcttgctatgtgaaaggaactttcagattaagaaatttctctcttttttctctataaattctgactctccagacttgtctggctataacccctgtccctgtctaattctcccagtctaaaatctaaacaatgacttcatttttttctagtactttctcctgaagtattgaaacctattgattcaatgggtagagatttgctaagtatgatgtgcttccacctcttctcttcatactctctaccttccttaccatgattcagccacactggcctttctgttccttggacatgcctggagacctgtccctgctcttccttctctctggggtgctcttccccctccttataaatgttcaggtcagcggaaatgttccttcctctgag

SEQ ID NO: 354 - DNA, 1708 bp, Homo sapiens
ggcggcatggggtctgtagacatccaggtagctgtggctgaggagaaagggcctctccaacatgacatcctcctgctgtgtcaccaacaacttgcaagcctctctcaagagctgcccccggcctgcctcggtctgttccagcggcgtgaactgccggcctgagctgtgcctgggctatgtctgccagcccatggcatgcctgccttcggtctgcctgcccaccaccttccggccagccagctgcctctccaaaacctatctatccagttcctgccaggcagccagtggcatctccggctccatgggccccggcagctggtacagcgaaggggccttcaatggcaatgagaaggaaaccatgcagttccttaacgaccgcctggccagctacctgacgagggtgcggcagctggagcaggagaatgcggagctggagagcaggatccaagaggcctctcactcccaggtgctcaccatgactcctgactaccagtctcatttcaggaccattgaggagctccagcagaagattctgtgtaccaaggcagagaatgccaggatggttgtgaacattgataatgccaaactggctgccgatgacttcagggccaagtacgaggcagagctggccatgcggcagctggtggaggccgacatcaatggcctgcgcaggatcctggatgatctcactctgtgcaaggctgacctggaggcccaggttgagtccctgaaggaggagctgatgtgcctcaaaaagaaccatgaggaggaagtcggttcccttcgatgccagcttggggaccgccttaacatcgaggtggacgctgcacccccggtggacctgaccagggtgctggaggagatgcggtgtcagtacgaggccatggtggaggccaaccgcagggacgtggaggaatggttcaatatgcagatggaggagcttaaccaacaggtggccacaagctctgagcagcttcagaactaccagtcagacatcattgacctgagacgcacggtcaacacgctggagatcgagctgcaggcccagcacagcctgagggactccctggaaaacacgctgacggagagtgaggcccgctacagctcccagctggcccagatgcagtgcatgatcaccaacgttgaggcccagctggctgagatccgggctgacctggagcggcagaaccaggagtaccaggtgctgctggacgtccgggcccggctggagggcgagatcaacacgtaccggagcctgctggagagcgaggactgcaagctgccctgtaacccatgctccactccttcctgcaccacctgtgtgccctccccatgcgtgacccgcaccgtctgtgtgccacgcactgttggcatgccttgctcaccctgcccccagggccgctactgaagtccctttgtgccagtggatcctggagggcctggggctgggcagcctggtattcagtggccaccagaagagcagggccagccccggtcagcaaggaagaccctgagcaggaccgtggatcacctgcaacaagctctgatactccaggggatacttaagccctcatcacttcaaaactgcctcttttttccatgggtgaactgttctctttggtgatgtttctggttgtctgtgctgcctcaaagagcgtgtgttcttagttaactggcaaatagagctgtactcagtggccttgcaaac

SEQ ID NO: 355 - DNA, 2051 bp, Homo sapiens
tgggctcaaatgacaggtccctttgaagaactgacagggacttggtcttcccagtgatgtggggtggtggagatgagtcttgacatagtaatggggctcctattttatgagactggtaaattttcacaggaaactaaataacaggttaatgaggggttttaatagaaagtggtgttaactttaatgaggagaaaacactttgtaaaggccaaccaatgcccactggggcagagatataaatctggggtaaggagctgcttctctgctttggggtgtctggcctcagagacctatcaattgcatctgagttgcaggggccatggcttccaaatgcctcaaggccggcttctcttctgggtctctcaagagcccaggaggggccagtgggggctccactcgtgtgtccgcaatgtactccagcagctcttgcaagcttccaagtctctcccctgtggccagaagtttctctgcctgctcagtgggtctgggcagaagcagctacagggccaccagctgcctccctgctctctgcctccctgctggaggcttcgctaccagctacagtgggggtgggggctggtttggggagggcatcctcactggcaatgagaaggagaccatgcaatccctgaacgaccgcctggccggctacctggagaaggtgcgtcagctggagcaggagaacgccagcctggagagccgcatccgtgagtggtgtgagcagcaggtcccctacatgtgccctgactaccagtcctacttccggaccatcgaggagctccagaagaagactctatgcagcaaggctgagaatgccaggctggtggtggagattgacaatgccaaattggctgcagatgacttcaggaccaagtatgagacggaggtgtccctgcggcagctggtggagtcagacatcaacggcctgcgcaggatcctggatgacctgaccctgtgcaagtctgacctggaggcccaggtggagtccctgaaggaggagctgctctgcctgaagaagaaccatgaggaggaagtgaactcactgcgctgccaacttggtgaccgcctcaatgttgaggtggacgctgccccacctgttgacctgaaccgagttctggaggagatgaggtgccagtatgaaaccctggtggagaataaccgccgggatgctgaagactggttggacacccagagtgaggagctgaaccagcaggtggtgtccagctcagagcagttgcagtcctgccaggcagagatcatcgagctgagacgcacggtcaacgccctggagattgagctgcaggctcagcacagcatgagagatgctttggaatccaccctggcagagacggaggcccgctatagctcccagctggcccagatgcagtgcatgatcaccaacgtggaggcccagctggccgagatccgggctgacctggagcggcagaaccaggagtaccaggtgctgctggacgtccgggcccggctggagtgtgagatcaacacgtaccggggcctgctggagagtgaggacagcaagctcccctgtaacccatgtgcacctgactactcaccctccaagtcatgccttccctgtcttcctgcggcctcctgcggtcctagtgcagcccgcacaaactgcagcccccgccccatttgtgtgccctgcccagggggtcggttctgagagcgggtgacccagatggccatggctattgtctccagggcttgaacttggcctctacccaaacttaacccttgtagcccaatcccctctcttcgcgcagagcccaggcccagggtctggctgaaaaggctttctgcaaatacatgccctaaagtttctcagagcctgtcacaaaggccggctgcccccaaaggtctcaactcctcatcatttcaatgggtgccagggtctctgttctcaggctgcctcctgggtcaggttttccttctaggtgctgttccggtggattctgaaatgcagtagagggcttttgttggcagaacaataaagtgcatttgctcaggcccctgatgcctaacttgca

SEQ ID NO: 356 - DNA, 1404 bp, Homo sapiens
atggccacccagacctgcacccctaccttctccactgggtctatcaagggcctctgtggcacagcaggcggcatctctcgggtgtcctccatccgttctgtgggctcctgcagggtccccagtctcgccggtgctgcagggtacatctcttctgctaggtcgggcctctctggccttgggagctgcttgcctggctcctacctgtcttctgagtgccacacctctggctttgtggggagcgggggctggttctgcgagggctccttcaacggcagcgagaaggagactatgcagttcctgaacgaccgcctggccaactacctggagaaggtgcgtcagctggagcgggagaacgcggagctggagagccgcatccaggagtggtacgagtttcagatcccatacatctgcccagactaccagtcctacttcaagaccatcgaagatttccagcagaagatcctgctgactaagtctgagaatgccaggctggtcctgcagattgataatgccaagctggctgctgacgacttccggaccaagtatgagacagagctgtctctgcggcagctagtggaggccgacatcaacggcctgcgtaggatcctggatgagctgaccctgtgcaaggctgacctggaggctcaggtggagtccctgaaggaggagctgatgtgcctcaagaagaatcacgaggaggaagtcagtgtactccgttgccaacttggggaccgactgaatgtggaggtggacgctgctcccccagtggatctcaacaagatcctggaggatatgagatgccagtacgaggccctggtggagaataaccgcagagatgtggaggcctggttcaacacccagactgaggagctgaaccagcaggtggtgtccagctcggagcagctgcagtgctgccagacggagatcatcgagctgagacgtacggtcaacgcgctagagattgagctgcaggctcagcacagcatgcggaattccttggaatccaccctggccgaaaccgaggcccgctacagctcccagctggcccagatgcagtgcctgatcagcaacgtggaggcccagctgtctgagatccgctgcgacctggagcggcagaaccaggagtaccaggtgttactggacgtcaaggcccggctggagggcgagatcgctacctaccgccacctgctggagggagaggactgcaagcttcctccccaaccttgtgccacggcatgcaagcctgttattagagttccttctgtccccccggtgccctgtgtcccctctgtgccctgcaccccggctccccaggttggcactcagatccgcaccatcaccgaggagatcagagatgggaaagtcatctcctccagggagcacgtgcagtcccgcccgctgtga

SEQ ID NO: 357 - DNA, 1693 bp, Homo sapiens
cacagtcctcggcccaggccaagcaagcttctatctgcacctgctctcaatcctgctctcaccatgagcctccgcctgcagagctcctctgccagctatggaggtggtttcgggggtggctcttgccagctgggaggaggccgtggtgtctctacctgttcaactcggtttgtgtctgggggatcagctgggggctatggaggcggcgtgagctgtggttttggtggaggggctggtagtggctttggaggtggctatggaggtggccttggaggtggctatggaggtggccttggaggtggctttggtgggggttttgctggtggctttgttgactttggtgcttgtgatggcggcctcctcactggcaatgagaagatcaccatgcagaacctcaacgaccgcctggcttcctacctggagaaggtgcgcgccctggaggaggccaacgctgacctggaggtgaagatccgtgactggcacctgaagcagagcccagctagccctgagcgggactacagcccctactacaagaccattgaagagctccgggacaagatcctgaccgccaccattgaaaacaaccgggtcatcctggagattgacaatgccaggctggctgtggacgacttcaggctcaagtatgagaatgagctggccctgcgccagagcgtggaggccgacatcaacggcctgcgccgggtgctggatgagctcactctgtctaagactgacctggagatgcagatcgagagcctgaatgaagagctagcctacatgaagaagaaccatgaagaggagatgaaggaatttagcaaccaggtggtcggccaggtcaacgtggagatggatgccaccccaggcattgacctgacccgcgtgctggcagagatgagggagcagtacgaggccatggcagagaggaaccgccgggatgctgaggaatggttccacgccaagagtgcagagctgaacaaggaggtgtctaccaacactgccatgattcagaccagcaagacagagatcacggagctcaggcgcacgctccaaggcctggagattgagctgcagtcccagctgagcatgaaagcggggctggagaacacggtggcagagacggagtgccgctatgccctgcagctgcagcagatccagggactcatcagcagcatcgaggcccagctgagcgagctccgcagtgagatggagtgccagaaccaagagtacaagatgctgctggacatcaagacacgtctggagcaggagatcgccacctaccgcagcctgctcgagggccaggacgccaagaagcgtcagcccccgtagcacctctgttaccacgacttctagtgcctctgttaccaccacctctaatgcctctggtcgccgcacttctgatgtccgtaggccttaaatctgcctggcgtcccctccctctgtcttcagcacccagaggaggagagagccggcagttccctgcaggagagaggaggggctgctggacccaaggctcagtccctctgctctcaggaccccctgtcctgactctctcctgatggtgggccctctgtgctcttctcttccggtcggatctctctcctctctgacctggatacgctttggtttctcaacttctctaccccaaagaaaagattattcaataaagtttcctgcctttctgcaaacataaaaa

SEQ ID NO: 358 - DNA, 1709 bp, Homo sapiens
ggtacctcctgccagcatctcttgggtttgctgagaactcacgggctccagctacctggccatgaccaccacatttctgcaaacttcttcctccacctttgggggtggctcaacccgagggggttccctcctggctgggggaggtggctttggtggggggagtctctctgggggaggtggaagccgaagtatctcagcttcttctgctaggtttgtctcttcagggtcaggaggaggatatgggggtggcatgagggtctgtggctttggtggaggggctggtagtgttttcggtggaggctttggagggggcgttggtgggggttttggtggtggctttggtggtggcgatggtggtctcctctctggcaatgagaaaattaccatgcagaacctcaatgaccgcctggcctcctacctggacaaggtacgtgccctggaggaggccaatgctgacctggaggtgaagatccatgactggtaccagaagcagaccccaaccagcccagaatgcgactacagccaatacttcaagaccattgaagagctccgggacaagatcatggccaccaccatcgacaactcccgggtcatcctggagatcgacaatgccaggctggctgcggacgacttcaggctcaagtatgagaatgagctggccctgcgccagggcgttgaggctgacatcaacggcttgcgccgagtcctggatgagctgaccctggccaggactgacctggagatgcagatcgagggcctgaatgaggagctagcctacctgaagaagaaccacgaagaggagatgaaggagttcagcagccagctggccggccaggtcaatgtggagatggacgcagcaccgggtgtggacctgacccgtgtgctggcagagatgagggagcagtacgaggccatggcggagaagaaccgccgggatgtcgaggcctggttcttcagcaagactgaggagctgaacaaagaggtggcctccaacacagaaatgatccagaccagcaagacggagatcacagacctgagacgcacgatgcaggagctggagatcgagctgcagtcccagctcagcatgaaagctgggctggagaactcactggccgagacagagtgccgctatgccacgcagctgcagcagatccaggggctcattggtggcctggaggcccagctgagtgagctccgatgcgagatggaggctcagaaccaggagtacaagatgctgcttgacataaagacacggctggagcaggagatcgctacttaccgcagcctgctcgagggccaggatgccaagatggctggcattggcatcagggaagcctcttcaggaggtggtggtagcagcagcaatttccacatcaatgtagaagagtcagtggatggacaggtggtttcttcccacaagagagaaatctaagtgtctattgcaggagaaacgtcccttgccactccccactctcatcaggccaagtggaggactggccagagggcctgcacatgcaaactccagtccctgccttcagagagctgaaaagggtccctcggtcttttatttcagggctttgcatgcgctctattccccctctgcctctccccaccttctttggagcaaggagatgcagctgtattgtgtaacaagctcatttgtacagtgtctgttcatgtaataaagaattacttttccttttgcaaat

SEQ ID NO: 359 - DNA, 1407 bp, Homo sapiens
cgcgaatcgcagcttctgagaccagggttgctccgtccgtgctccgcctcgccatgacttcctacagctatcgccagtcgtcggccacgtcgtccttcggaggcctgggcggcggctccgtgcgttttgggccgggggtcgcctttcgcgcgcccagcattcacgggggctccggcggccgcggcgtatccgtgtcctccgcccgctttgtgtcctcgtcctcctcgggggcctacggcggcggctacggcggcgtcctgaccgcgtccgacgggctgctggcgggcaacgagaagctaaccatgcagaacctcaacgaccgcctggcctcctacctggacaaggtgcgcgccctggaggcggccaacggcgagctagaggtgaagatccgcgactggtaccagaagcaggggcctgggccctcccgcgactacagccactactacacgaccatccaggacctgcgggacaagattcttggtgccaccattgagaactccaggattgtcctgcagatcgacaatgcccgtctggctgcagatgacttccgaaccaagtttgagacggaacaggctctgcgcatgagcgtggaggccgacatcaacggcctgcgcagggtgctggatgagctgaccctggccaggaccgacctggagatgcagatcgaaggcctgaaggaagagctggcctacctgaagaagaaccatgaggaggaaatcagtacgctgaggggccaagtgggaggccaggtcagtgtggaggtggattccgctccgggcaccgatctcgccaagatcctgagtgacatgcgaagccaatatgaggtcatggccgagcagaaccggaaggatgctgaagcctggttcaccagccggactgaagaattgaaccgggaggtcgctggccacacggagcagctccagatgagcaggtccgaggttactgacctgcggcgcacccttcagggtcttgagattgagctgcagtcacagctgagcatgaaagctgccttggaagacacactggcagaaacggaggcgcgctttggagcccagctggcgcatatccaggcgctgatcagcggtattgaagcccagctgggcgatgtgcgagctgatagtgagcggcagaatcaggagtaccagcggctcatggacatcaagtcgcggctggagcaggagattgccacctaccgcagcctgctcgagggacaggaagatcactacaacaatttgtctgcctccaaggtcctctgaggcagcaggctctggggcttctgctgtcctttggagggtgtcttctgggtagagggatgggaaggaagggacccttacccccggctcttctcctgacctgccaataaaaatttatggtccaagggaaaaaaaaaaaaaaaaaaaaaaaaaa

SEQ ID NO: 360 - DNA, 2352 bp, Homo sapiens
ccctgcacttgggagccggtagcactcctatcactgcttctcaacccgtgagctaccagctgtgtcatgagctgcagacagttctcctcgtcctacttgaccagcggcgggggtggcgggggcggcctgggcagcgggggcagcataaggtcttcctacagccgcttcagctcctcagggggccgtggaggagggggccgattcagctcttctagtggctatggtgggggaagctctcgtgtctgtgggaggggaggcggtggcagttttggctacagctacggcggaggatctgggggtggttttagtgccagtagtttaggcggtggctttgggggtggttccagaggttttggtggtgcttctggaggaggctatagtagttctgggggttttggaggtggctttggtggtggttctggaggtggctttggtggtggctatgggagtgggtttggggggttagggggctttggaggtggtgctggaggaggtgatggtggtattctgactgctaatgagaagagcaccatgcaggaactcaattctcggctggcctcttacttggataaggtgcaggctctagaggaggccaacaacgacctggagaataagatccaggattggtacgacaagaagggacctgctgctatccagaagaactactccccttattataacactattgatgatctcaaggaccagattgtggacctgacagtgggcaacaacaaaactctcctggacattgacaacactcgcatgacactggatgacttcaggataaagtttgagatggagcaaaacctgcggcaaggagtggatgctgacatcaatggcctgcggcaggtgctggacaatctgaccatggagaagtctgacctggagatgcagtatgagactctgcaggaggagctgatggccctcaagaagaatcataaggaggagatgagtcagctgactgggcagaacagtggagatgtcaatgtggagataaacgttgctcctggcaaagatctcaccaagaccctcaatgacatgcgtcaggagtatgagcagctcattgctaagaacagaaaggacatcgagaatcaatatgagactcagataacccagatcgagcatgaggtatccagtagtggtcaggaggtgcagtccagtgccaaggaggtgacccagctccggcacggtgtccaggagttggagattgagctgcagtctcagctcagcaagaaagcagctctggagaagagcttggaagacacgaagaaccgctactgtggccagctgcagatgatccaggagcagatcagtaacttggaggcccagatcactgacgtccggcaagagatcgagtgccagaatcaggaatacagccttctgctcagcattaagatgcggctggagaaggaaatcgagacctaccacaacctccttgagggaggccaggaagactttgaatcctccggagctggaaaaattggccttggaggtcgaggaggaagtggaggcagttatggaagaggatccaggggaggaagtggaggcagctatggtggaggaggaagtggaggtggctatggtggaggaagtgggtccaggggaggaagtggaggcagctacggtggaggaagtggttctggaggaggtagtggaggtggctatggtggaggaagtggaggtggccatagcggaggaagtggaggtggtcatagtggaggaagtgggggcaactatggaggaggaagtggctctggaggaggaagtgggggtggctatggtggaggaagtgggtccaggggaggaagtggaggcagccatggtggaggaagtggttttggaggtgaaagtggaggcagctacggaggcggtgaagaagcgagtggaagtggtggcggctacggaggaggaagcggaaaatcatcccattcctagtcttcttcctcaaaatctggtgaccaagatgagacaaaaggcttcctttcgcgatactagagcctctgtaaacttctcctgcccagcccccagctgagcatccccagatgggcagactcccgatgaagcctgcttattggatcctgacatcaggaatagctggcaacaagcccctgtgcccgtttgggactgaactgacttggcatatgtgctctggctttccattggcttccaaccctgcttggctttggatgccttcagggttcccgagacagacctctttcctctctctggcctgggagctctcacaccctgcacgatcttgactataataaagcttccctactgcaaaaaaaaaaaaaaaaaaaaaaaaaaaaaaaaaaaaaaaaaaaaaaaaaaaaaaaaaaaaaaaaaaaa

SEQ ID NO: 361 - DNA, 1634 bp, Homo sapiens
acccgagcaccttctcttcactcagccaactgctcgctcgctcacctccctcctctgcaccatgactacctgcagccgccagttcacctcctccagctccatgaagggctcctgcggcatcgggggcggcatcgggggcggctccagccgcatctcctccgtcctggccggagggtcctgccgcgcccccagcacctacgggggcggcctgtctgtctcatcctcccgcttctcctctgggggagcctacgggctggggggcggctatggcggtggcttcagcagcagcagcagcagctttggtagtggctttgggggaggatatggtggtggccttggtgctggcttgggtggtggctttggtggtggctttgctggtggtgatgggcttctggtgggcagtgagaaggtgaccatgcagaacctcaatgaccgcctggcctcctacctggacaaggtgcgtgctctggaggaggccaacgccgacctggaagtgaagatccgtgactggtaccagaggcagcggcctgctgagatcaaagactacagtccctacttcaagaccattgaggacctgaggaacaagattctcacagccacagtggacaatgccaatgtccttctgcagattgacaatgcccgtctggccgcggatgacttccgcaccaagtatgagacagagttgaacctgcgcatgagtgtggaagccgacatcaatggcctgcgcagggtgctggacgaactgaccctggccagagctgacctggagatgcagattgagagcctgaaggaggagctggcctacctgaagaagaaccacgaggaggagatgaatgccctgagaggccaggtgggtggagatgtcaatgtggagatggacgctgcacctggcgtggacctgagccgcattctgaacgagatgcgtgaccagtatgagaagatggcagagaagaaccgcaaggatgccgaggaatggttcttcaccaagacagaggagctgaaccgcgaggtggccaccaacagcgagctggtgcagagcggcaagagcgagatctcggagctccggcgcaccatgcagaacctggagattgagctgcagtcccagctcagcatgaaagcatccctggagaacagcctggaggagaccaaaggtcgctactgcatgcagctggcccagatccaggagatgattggcagcgtggaggagcagctggcccagctccgctgcgagatggagcagcagaaccaggagtacaagatcctgctggacgtgaagacgcggctggagcaggagatcgccacctaccgccgcctgctggagggcgaggacgcccacctctcctcctcccagttctcctctggatcgcagtcatccagagatgtgacctcctccagccgccaaatccgcaccaaggtcatggatgtgcacgatggcaaggtggtgtccacccacgagcaggtccttcgcaccaagaactgaggctgcccagccccgctcaggcctaggaggccccccgtgtggacacagatcccactggaagatcccctctcctgcccaagcacttcacagctggaccctgcttcaccctcaccccctcctggcaatcaatacagcttcattatctgagttgcat

SEQ ID NO: 362 - DNA, 1688 bp, Homo sapiens
acagcacgctctcagccttcctgagcacctttccttctttcagccaactgctcactcgctcacctccctccttggcaccatgaccacctgcagccgccagttcacctcctccagctccatgaagggctcctgcggcatcggaggcggcatcgggggcggctccagccgcatctcctccgtcctggccggagggtcctgccgtgcccccagcacctacgggggcggcctgtctgtctcctctcgcttctcctctgggggagcctgcgggctggggggcggctatggcggtggcttcagcagcagcagcagctttggtagtggcttcgggggaggatatggtggtggccttggtgctggcttcggtggtggcttgggtgctggctttggtggtggttttgctggtggtgatgggcttctggtgggcagtgagaaggtgaccatgcagaacctcaatgaccgcctggcctcctacctggacaaggtgcgtgctctggaggaggccaacgccgacctggaagtgaagatccgtgactggtaccagaggcagcggcccagtgagatcaaagactacagtccctacttcaagaccatcgaggacctgaggaacaagatcattgcggccaccattgagaatgcgcagcccattttgcagattgacaatgccaggctggcagccgatgacttcaggaccaagtatgagcacgaactggccctgcggcagactgtggaggccgacgtcaatggcctgcgccgggtgttggatgagctgaccctggccaggactgacctggagatgcagatcgaaggcctgaaggaggagctggcctacctgaggaagaaccacgaggaggagatgcttgctctgagaggtcagaccggcggagatgtgaacgtggagatggatgctgcacctggcgtggacctgagccgcatcctgaatgagatgcgtgaccagtacgagcagatggcagagaaaaaccgcagagacgctgagacctggttcctgagcaagaccgaggagctgaacaaagaagtggcctccaacagcgaactggtacagagcagccgcagtgaggtgacggagctccggagggtgctccagggcctggagattgagctgcagtcccagctcagcatgaaagcatccctggagaacagcctggaggagaccaaaggccgctactgcatgcagctgtcccagatccagggactgattggcagtgtggaggagcagctggcccagctacgctgtgagatggagcagcagagccaggagtaccagatcttgctggatgtgaagacgcggctggagcaggagattgccacctaccgccgcctgctggagggcgaggatgcccacctttcctcccagcaagcatctggccaatcctattcttcccgcgaggtcttcacctcctcctcgtcctcttcgagccgtcagacccggcccatcctcaaggagcagagctcatccagcttcagccagggccagagctcctagaactgagctgcctctaccacagcctcctgcccaccagctggcctcacctcctgaaggcccgggtcaggaccctgctctcctggcgcagttcccagctatctcccctgctcctctgctggtggtgggctaataaagctgactttctggttgatgcaaaaaaaaaaaaaaaaaaaaaaaaaaaaaaaaa

SEQ ID NO: 363 - DNA, 1512 bp, Homo sapiens
ctcctctccagcccttctcctgtgtgcctgcctcctgccgccgccaccatgaccacctccatccgccagttcacctcctccagctccatcaagggctcctccggcctggggggcggctcgtcccgcacctcctgccggctgtctggcggcctgggtgccggctcctgcaggctgggatctgctggcggcctgggcagcaccctcgggggtagcagctactccagctgctacagctttggctctggtggtggctatggcagcagctttgggggtgttgatgggctgctggctggaggtgagaaggccaccatgcagaacctcaatgaccgcctggcctcctacctggacaaggtgcgtgccctggaggaggccaacactgagctggaggtgaagatccgtgactggtaccagaggcaggccccggggcccgcccgtgactacagccagtactacaggacaattgaggagctgcagaacaagatcctcacagccaccgtggacaatgccaacatcctgctacagattgacaatgcccgtctggctgctgatgacttccgcaccaagtttgagacagagcaggccctgcgcctgagtgtggaggccgacatcaatggcctgcgcagggtgctggatgagctgaccctggccagagccgacctggagatgcagattgagaacctcaaggaggagctggcctacctgaagaagaaccacgaggaggagatgaacgccctgcgaggccaggtgggtggtgagatcaatgtggagatggacgctgccccaggcgtggacctgagccgcatcctcaacgagatgcgtgaccagtatgagaagatggcagagaagaaccgcaaggatgccgaggattggttcttcagcaagacagaggaactgaaccgcgaggtggccaccaacagtgagctggtgcagagtggcaagagtgagatctcggagctccggcgcaccatgcaggccttggagatagagctgcagtcccagctcagcatgaaagcatccctggagggcaacctggcggagacagagaaccgctactgcgtgcagctgtcccagatccaggggctgattggcagcgtggaggagcagctggcccagcttcgctgcgagatggagcagcagaaccaggaatacaaaatcctgctggatgtgaagacgcggctggagcaggagattgccacctaccgccgcctgctggagggagaggatgcccacctgactcagtacaagaaagaaccggtgaccacccgtcaggtgcgtaccattgtggaagaggtccaggatggcaaggtcatctcctcccgcgagcaggtccaccagaccacccgctgaggactcagctaccccggccggccacccaggaggcagggagcagccgccccatctgccccacagtctccggcctctccagcctcagccccctgcttcagtcccttccccatgcttccttgcctgatgacaataaagcttgttgactcagctaaaaaaaaaaaaaaa

SEQ ID NO: 364 - DNA, 1753 bp, Homo sapiens
cagccccgcccctacctgtggaagcccagccgcccgctcccgcggataaaaggtgcggagtgtccccgaggtcagcgagtgcgcgctcctcctcgcccgccgctaggtccatcccggcccagccaccatgtccatccacttcagctccccggtattcacctcgcgctcagccgccttctcgggccgcggcgcccaggtgcgcctgagctccgctcgccccggcggccttggcagcagcagcctctacggcctcggcgcctcgcggccgcgcgtggccgtgcgctctgcctatgggggcccggtgggcgccggcatccgcgaggtcaccattaaccagagcctgctggccccgctgcggctggacgccgacccctccctccagcgggtgcgccaggaggagagcgagcagatcaagaccctcaacaacaagtttgcctccttcatcgacaaggtgcggtttctggagcagcagaacaagctgctggagaccaagtggacgctgctgcaggagcagaagtcggccaagagcagccgcctcccagacatctttgaggcccagattgctggccttcggggtcagcttgaggcactgcaggtggatgggggccgcctggaggcggagctgcggagcatgcaggatgtggtggaggacttcaagaataagtacgaagatgaaattaaccgccgcacagctgctgagaatgagtttgtggtgctgaagaaggatgtggatgctgcctacatgagcaaggtggagctggaggccaaggtggatgccctgaatgatgagatcaacttcctcaggaccctcaatgagacggagttgacagagctgcagtcccagatctccgacacatctgtggtgctgtccatggacaacagtcgctccctggacctggacggcatcatcgctgaggtcaaggcacagtatgaggagatggccaaatgcagccgggctgaggctgaagcctggtaccagaccaagtttgagaccctccaggcccaggctgggaagcatggggacgacctccggaatacccggaatgagatttcagagatgaaccgggccatccagaggctgcaggctgagatcgacaacatcaagaaccagcgtgccaagttggaggccgccattgccgaggctgaggagcgtggggagctggcgctcaaggatgctcgtgccaagcaggaggagctggaagccgccctgcagcgggccaagcaggatatggcacggcagctgcgtgagtaccaggaactcatgagcgtgaagctggccctggacatcgagatcgccacctaccgcaagctgctggagggcgaggagagccggttggctggagatggagtgggagccgtgaatatctctgtgatgaattccactggtggcagtagcagtggcggtggcattgggctgaccctcgggggaaccatgggcagcaatgccctgagcttctccagcagtgcgggtcctgggctcctgaaggcttattccatccggaccgcatccgccagtcgcaggagtgcccgcgactgagccgcctcccaccactccactcctccagccaccacccacaatcacaagaagattcccacccctgcctcccatgcctggtcccaagacagtgagacagtctggaaagtgatgtcagaatagcttccaataaagcagcctcattctgaggcctgagtgatccacgtgaaaaaaaaaaaaaaaaaaaaaaaaaaaaaaaaaaaaaaaaaaaaaaaaaaa

SEQ ID NO: 365 - DNA, 9721 bp, Homo sapiens
aaactcccttcccctcgcccaagcagagtggagaggggtacaggaaggagggacgcttacgagaagaggaggtatgagctgagtcctgagatagaagagaagagaaagtttttgcccaaagggacacaggatgaatgataaattaacaatagaataaatagaacaaataatgaataaataaacatttacacagttcttattaagtgataggtagggccctaaatgctttctggtcattatctcattagatcctggcaacggctctcagtgcttactattattatcgctattttgcctgtgagaaaactgaggctcagaaaggttattcagctgcccaaggtcatgacatgaacctgcgggactgacttcagaggccccacactctcgacacacgcacacactcgccccacacacggtgcccgctgcgggggaccggggctatgggactgggaccgaagtggaggccggatccaacaaggcaaagctcggagtcccggcggaggggcggacaggtggagggtttcactcgcactgaccgcagcgcacgggcagcggggctgaccaggcgcttcccggccccataaaactcgggcgggaggcgaacgccgttttatgcaggcggccgggcggcctggctcgctttcattcccggctccgcgaggcgcgagggccgagccctccaagctcgtaaacgccttggccgcgagctccctccccgggcccgcgggccgtcatataaggcgcagcgccggcttggggtccagccgcccgcccctgccgccaccgcaccatgtcctgcctctactcccgcctcagcgccccctgcggggtccgcgccttcagctgcatctcggcctgcgggccccggcccggccgctgctgcatcaccgccgccccctaccgcggcgtctcctgctaccgcggcctcaccggaggcttcggcagccacagcgtgtgcgggggcttccgcgccggctcctgcggacgcagcttcggctaccgctccgggggcgtgtgcggacccagccccccatgcatcgccaccgtgtcggtcaacgagagcctcctcacgcccctcaacctggagatcgaccccaacgcacagtgcgtgaagcaggaggagaaggagcagatcaagtccctcaacagcaggttcgcggccttcatggacaaggtgggtgtcctggatcacacctttcctgaacctggaagtcctggaaggagatggaaattcccagtggtctctctagaaatggggaatgaggatggctgatattttatataatgttaggcggtgccggcccataatattaaataacattgaaacacgtggtaagaaaatacatcttctttaatgtctgtttcaatccttaagattaggtgggaaaaaaatatcactggatgctaatgtttttagcatctctctaatacttgcttccctcctgcttctaataaagagagcaagccccggcttcagaactgtctaggacaactgtttctactagaatttaatgttctgtaatttccctttatgtatgcctagtaatgatggttttgcatctctggtggccatatgaagttactcttttaaccccatacgtgtaaatgttaattgaatccacttatagataaattaggagtaaaatagtatatgggatggcaaaatcctgaagtcagccttgggtgtacacagaagagaaaggaggcagagagagggtgaggggctggcccaagggcccacagagagtgggtgccagaacagggttccaagcccaggccctctccaactctccagcccctgggctagaaggtccacagcttgggatcccagctgccccactccctctagaaggggctggttcacctcaacaggcactgcacgctggagaggtgacccaggagcggctcgtggaatggacactggcccaggagcaggccacctggcctccatgctcagttaagttcctctactgacgcattgtgtggcactgggcagaggcttcccttctccaccccagtggcttcctcaccagggctgtgtgtggtgcagtgtgtgagctggccatgactctgaaagggaaaatggggcccaaggcagccatgagaccccatagccaagaccacctgaaattatgccatgtaatatcagcagtccccactccccatgtctgcaagttccaacctgggaattcccagctgcactcatggagttggatgaaaaggaccccagggcttaaagggaaggagacatctcagctccagctcaaatgtacgagaagtggaaaactggaagccaagggccctagtttgtttgctgacatcctttctggccagcacaatgtattgttgccatgtgttcctccagtttcagtgaaatccaggaaaagcgtacaagcctcacttccctagggtcctcaccctctctgttttccaaaacctccccccattcacattacatatgtctggcccccagagacatatgacacagtgtccaacataagaatttaggccacctaggaccatgccccacactccccaatgcctcttcaggccccaggcgtcctgcttggtaagagcctagcctctatgacctccccagctaggaagcccttcccaccttgaccatctgttcaatcaaatgttcaccaagccaagggctggctatgaggacatcaataaataagccataggccctgccctgagggagcttatagtgagaggcattctccctactctatccctcccaacactgctctacattcctttcctccaggaagtcttccctaattgtcactaccccctacccccatctgtccgccgctagcctgacagtaacccagcacagcccacaggcctctcagtctgtcgctcatcccatccaggcccacctggacagaccctcacttagccctgaataagcaattatgaaacaaggattctccagctgcatcctcaggccaggagagaccagcaggggccatgtggtctaccccttgcctctgcacatcttactgccagttctgtcttgactctggctgttccccaaggagggctggggatattggctcctccaaccaacatttctcccacttccacaccaggtgcacttcctggagcagcagaacaagctgctggagacaaagctgcagttcttccagaaccgtgagtgctgcgagagcaacctggagcctctgtttgagggctacaactctgcgacgggaggccgagtgcatggaagccgacagtgggaggctggcctcagagctcaaccacgtgcaggaggtgctggagggttacaagaagaagtaagtgcagtgggaggagggtttggagaaattaaatgggattaagtcaaagtatgatagatttgggttcgaccataagaggaacttcccaacaggaagaaaatagtacaataatcctgtggggtggggggaatttcttttctagactgggagtttaaacattggagattctgaactgctccagctacttcatcattatgtttatttcattaattcatcaaacattttattgagcatctactcaatgttgtaggtgctatgttgggctctgagtgggaaaggagtaaggaagtaagaaggaggagaaaggagaggtaccagaactgggcagggttcctgccccaaaggagttacagcccagaaacagagaggaggtcttcgaaaatgtgcagggcccccaccctgacccacatcaggaatgaaagtccctgaaatagaaagagctttgagtaacatgggttggtttgaatgcccagaagaaagggatggacaagttcccttcagtccaacacttttttgattcttgtgaccacctccaaaagatccagttcccggaatgtgtttgcctgtgccttcattcccattttttttcctccccagatctgagccttgtgtgttttgtccccaggtatgaagaagaggtggcactaagggccactgctgagaatgaatttgtggccttgaagaaggtgagtgaccccagaatccttgtcccctaactcagaatggaggccagagacagaagggtcctagacccaaaggtttgagctgggagaccttgactaacatcaggctctctgtagttcggagaggtggagggactcccttagaatcacacggcccagcttctttctgttcctttccccagtgctccagtgctccctgggtgcctctggcagcagaatacactgcctgcttcaggcagggcaatattctcccccatctgaggttgctgccatatagccaccagattttcacctccttcagccctgcgcctggcatagagtaggcaccctgtaaatatttgcgagtgaaagagcaggtgaattatagacaatggctgcatcctcaggccagcaacagctcagaaccacaggcaggggcagtgaccgtcattccttgcctcttagacttgactctgtacaagtgcctggactctcattaggcccttccagccacctccatatgaggaaagcaggggttattgtgagaaaatgaggtgcagaggttaagggggctgctcagagtgacactgacttggaagggacagagttgagccctgagccctcttctgaccacagatctagattatcttccatgagattccagagcggagaggggtggggcatcattagaatttacccactgtacaccagatcttaagttttggtgatagtgcatgacatggattctagagaaatcatcccagtgggtgccagaggaagtacctgcaaacctcagtgtccccctcccttacccaaacctgctcttgacgccactactaactgtataaggggcttcaccacggcatgataccaggcactgggatgagcacgtacagagggtttccagggaagctgctcagcctgatggggtgcccctccctggtaggaaaaaaacaagggttctgaattgtctcccagtgcaattcctgtgccaccttctcccctttaggatgtggactgtgcctacctgcgcaaatcagacctagaggccaacgtggaggccctgacccaggagatcgacttcctgaggcggctatatgaggaggtgcggggtcacaaagcagcggggcagcaaggaggatatgagttagacattggaaaatacttgtcaccattcagcttctgaccctatggtgggacaaggggagaaaccccaggcaggttcaccatgagcaggtgaagaagtgtggcttgacctcccactgccatgccccaggcaacctggtgttcctggttactaaagtgacaattgccacaaggtggtaaactctggtcctagacccaaaggttcaagctggaaggtcctgattaaaatcaggcactgggcctcagacatggactctctacctccaagtcctctaggctcaggactctgggcttgaggagtcctgagggggtcccagggttgaggtggaagactgtaactgggagggtggggcttcagacatcgaagaagcagggaaaggggacaagggatgatgatgagggtgggctaccaagagtagggctctggtctaagaagctcttgccactccccatctcctgcaggagatccgcgttctccagtcgcacatctcagacacctcagtggtcgtcaagatggacaacagtcgggacctgaacatgcactgtgtcatcactgagatcaaagctcagtacgatgacattgccacccgcagccgggccgaggccgagtcctggtaccgcagcaaggtgagtggcacaggacacctgcctgctagacatggcagttggagggatgcaaggtacctattaaataggcttccttttctggggattctggtccctacggatgggaagataagggctgcctctctgaggttggggtagcagggcaggactgccatgtgtggttgcacaggctgagcactgcacaacctgcacaatcatccgtggtgtcctgaatggatgggaggtcccaccctgagcctcataagcaactctacttccccagtgtgaggagatgaaggccacggtgatcaggcacggggagaccctgcgccgcaccaaggaggagatcaacgagctgaaccgcatgatccagaggctgacagccgaggtggagaacgccaagtgccaggtatgggagcccagcccacccctcagtgtaggaagagagtggggttagccctcagcagagggatttgggttagaccccttgccagtgtgtggggacaagggcaaacacccagcatgaggacagacagcctcctccatggaaaacgttctccattctcgctgaatggaggcattggggcaatatggagggaatgaggtgcttcaagggcagagtggggcagaggaaatagcaccagtctaaggggcaggaaacctgggctctcaaacaagctctgccactagtttgccatgagacttgggaaaggcatttaacctctctggcctgttgttctagatcagtgatcacacattcagacatcaatggggttagtaaatgagcgaagcaagcaagctgttcccaaggcacttgggtatgatagggactatggtaaactggaaagcacaaaaggcagggctaggcagatccaactgaggcaggccatgcagaaatgcaggtccagtgtggccagatcctctgatcttttgaaagaagccaagaatttcaattattgtgttaaatttccaaaattgaagacactgtgcaaacatgcctgggagcactaatttgcaacccctggcctaacaaatagacaaggcctctttttcttctgctagtcagtggtcagtggttacctggcctctgaccctgaagccagaacagagatccttaataaccctcccttgcctcccagaactccaagctggaggccgcggtggcccagtctgagcagcagggtgaggcggccctcagtgatgcccgctgcaagctggccgagctggagggtgccctgcagaaggccaagcaggacatggcctgcttgatcagggagtaccaggaggtgatgaactccaagctggcctggactttgagatcgccacctacaggcgcctgctggagggcgaggagcagaggtgaggaccacagctgtggggagggtgtcccctcagtttcccccaggcagtgctgcagtgcttcaacacccaggagcatgtctgcatattatttacttggaatgtgcatcaacgctaattggaggagagaatttgcaggttaaacagatttcaccagctttgctccccacaactaatttctgtctctttgctttccctataaggttgtgtgagggcgttggtgctgtaaatgtctgtaagtaatccattttgtgggtcctgaaataacagcttggggttctgggcaggcaaactttttcttagagcttcagatagtaaaaactttaggctcgtgggccatgtagtctctgcctcaactgctccactccgttgtcatgtaaagcagccacagccaaaggcaatacttgaagaagcggtatgactgggttccaagaaaacttgattgacaaacaggaagcctgcatgtggccgtagtttgcagactctaaaaggaaagatggagtggggcagtgagtgcttatagtaacttaattagctacagtcatgtaccacataaggacttttaggtcaaggatggatggaatataggacagtagtcccattagattataccatatttttactctactttcctaggtttagctatgttcagatacacaaatacctaccatggtgttacagttgcctttagtcttcagtacagtcacatgctgtacagatttgtagcttagaagcaacaggctatgctatagggtaaacttgtcaaacccctgaccagaaggctgcatacagcccaggacggctttgaatgtggcccagcacaaatttgtaaacattcttaaaacttacgagattttcgtgtgtgtgattttttaaagctcatcagctaccgttagtattagtgtattttatgtgtggcccaagacaattcttcttcttccagtgtggcccagggaagccaaaagattggacacccttggggcctgggtgtggtggcttacacctgtaatcccagcactttgggaggccaaggcaggtggatcacttgaggtcaggagtttgagatcagcctggccaacatggtgaaaccccgtctctactaaaaataaaaaaattagccgggcaaggtgatggacacctgtaatcccagctactagggaggctgaggcaggagaatcacttaaacccaggaggcagaggttgcagtgagccgagatcgcgccactgcactccagtctgggcgatagagagagactccgtctcaaaaataaaaataaaaaataaaaaaggttggccacccttgccacagagcccaggtgtgtagtaggctacaacatgtaggtttgcgtatgtgcactccatgatgttcgcacaatgacaaaatcatttaatgctgtatttctcagaacatgtctctgttgtgaggcgaagcatggctatgtctgcctatagagaggacctgggctaacagtgtatcaaggacgcctgaggctaagactgcaggaaggagtgcccatgtgagggtttgaggggcgcgcatagaaacagaggggagaagctctgagcagaaggggtctctggccgccaggagactgggccctgtcctccccctctggcaggtgtcagcagctcccgcggcggggtcttatgcggggacctgtgcgtgtcgggctcccggccggtgacgggcagcgtctgcagtgccccctgcagcgggaacgtggcggtgagcaccggcctgtgtgcgccctgcggccagagcagcggcagcggccgctccgtgcgcttcgcctgagcgccccactttgtaccgacgccgcctcaccagcagcagcctctgcctccagaggcagcccggagctcccacggtccccagacgtggggaaggagggcttcggggcccagcctccccatcggcccccacgccgcgccttcctgtctcgcatccccgcccgctagtcccttcactgcttccgagagcacagggctcctagcccgcagctctcccaacccccgaatctaaaggactgtcctcgcagccctaggtaaagaccccggtccggaggcctggatgcctgtggcttctgagggacagatgggcctggagccccttggtgtggacttgctgtgccttctaatccaatgtcttctaatacacgtgcaggacaggccacctctcctgcctggctgcctggctccctccctctcccctgtgcttgtctcagcatttccagtaaagctcctgatcatatgcattgtgccctgagagtctctccttcctcttgcccacttggtcttcttagtcgggagggagagggcctggatctcctgacaccttgggtgggaaccccatcactgtggctgctggtccactttttccactctccaccccagcccccacctcagcatttgaaagttccctgaccatagggtcaaatatacagacttcctcccagaagccaacacatcccacatagctcccccatccacaccaccaccatcacccctggggtcccagacacagagacctccctgtggctccacagtacccatcatatgtgctgctgcccacatgggcacatttccccatgcataggccctgccacagaacacctgccacactcacatagcacacagacc

SEQ ID NO: 366 - DNA, 4721 bp, Homo sapiens
tgctagcagtgagggaaaggtcagagtcctcttcttcctctggcttcatgtcctccagcagagagtcgccatgacttgtagattgtcttgcctaggctcccgagcggagtctgcaaatccaggtcctgtgcagccactcagagatatggttatgaccccaccctcagctgcatcttgccctccgggccctggtctggtggctgctgcatcacggcaagcccctgctaccatggcctcactgggggctttggcactggttcctgtggacacagattcagctaccactctggcagcacatgcgggcccagcactgcctgtaacaccattgtgttgatcaatgagagcctcctcatgcccctcaacctggagattgcacagtgcataaagcaggaggaggagaagatcaagtgcctcaacagcaggtttactgccttcctccacaaggtgggtgtcctggatcacacccttcctgaacccccaccatgtgcacaaccaggactgggcactgaggaaagaatcagaggcaggcaagaccctgcgtgcctgaggtcccagtctgatgggagaggcacacagacagacagacagacagacagacagacagacagacagaggcacccaaggcccagaaatactctgacagttcagatacggagagcttgtggaggaaagatgccaaatttcaaaatttcaatgaatttagtttaaagatcttagttggattttatatgcaattttagaattgggcagcccttagaactgatcagaggaactctggctgcactgcggtcccacaatacttatggacagaaaacagaaagtgacacatggaaaacagaagtaacagctggattgtttgcagctggtgtttgtgaacatttggctgcctgtgattgactgaagctcagttactgtgattggctgagactcagctatttgttacaaaggaaaattctgaagttaggtttgtaagggataattggaaggacagccgagaaaggaataaggccaatagacccaagttcaggcaagctgatttactgtcagtcctgccgggctacctcctgacaaaagcagaggaggcagccctgcttataggctattgcaaggttttatagggcatgtattcctaattccaactaggaatgttggaattagcagtttctggccaaggatctgaggtacagttattataggttaaaagagtgctggccaggcgcggtggctcacgcctgtaatctcagcactttgggaggctgagcgggggtagatcacgaggtcaggagtttgagaccagcctgaccaacatggtgataccccgtctctactaaaaatacaaaaattagcttggcgtggtggcacgcacctgtaatcccagctactccagaggctgaggcaggagaattgcttgaatctgggaggcagaggttgcagtgagctgaggttgcgccactgtactccagcctgggtgacaaagcaagattctgtctcaggaaaaaaaaagtgctatagtaccctggcacataagtcaatttgcaagaaaatctgtttgggattttggtgcaaacttgccttgcaatatactcattagtcttggttcttgaatcacatgactgggttaaagtaaaacaggtcatgagaacaaatgagtctggaagtctaattccgtaatagggaccactgctataatacatcatagattgatcccttatgaaatagctactggaaggcctatgccctaataatagaactcatttattttctactcccctaaactctgacataactaaatgctgcaaggttttaatgcattatgccaaagtatattttcaccaggtaaaggaagcttttcaagatctatcaactgaggacaatcaaacccttcacaatctagaatgcagagatcaggtcatctggagacgatatctgagaaagactgccattgagccccattggagggggccatatcaagttcttctcatcacccactcttcagcaaaacttcagggccttggaccttcggtctacatctcgcaactcaaaagggtccattcagactcttagaactgcacatccattggagaccttaagataaagccaagcagagaagtttcttcccagaaacagacagtattctagatgtggacagctttcccaagaccatggatcaagacttctctgccgtcatgcaactcttacctctcttaattttttccttgcttacgccttcctcattcacttggcaggataatgctgtaattcgaatttcataatcagtagcttctgagagtaatttttttttctttttgagacggagtctctattgcccaggttggggtgcagtggtgtgatcttggctcactgcaaacctctgtctcttgggttcaagcaattctcatgcctcagcctcccaagtagctgggattactggcatgcaccaacacactggctaatttttgtatttttttttttttttttttttggtagagatgggatttcaccatgttggccatgctggtcacaaactcctcactgcaggtgatctgcctgcctcagcctcccaaagtgctaagattacaggagtaggccgccatgcccaaccttctgagagtaacttgacggagtgttgtatctgtcatgtcaaactcaaatctttacattacctacaaagtccacctattggccaacttcagcaacatccctaatgcaactatttgttcaaattatagctatgttctcaacttaagtcactgcccccacctcttgcaggagatccatgttctccaatcccacatctcagacacctctgtggttgtcaagctggacaacagccaggacctgaacatggactgcatcattgccgagatcaaggcacagtatgacgacattgtcacctgcagctgggccaaggctgagtcttggtaccatggctgcctgccagatgtggcacctgcctgctagatgtggcagttgggagggcaggatgtgagatacctattagatagacttattttgcctggggattctggatagtaggccaatagctctcaggttggggtggcagggcaggactgccatgtgtggttgcacaggctgagcactgcacaacctgcacaatcatccctaaaggaagggatatcccacactgagcctcaggagcatctctgcttcccccatttcggggagatgaaggccacggtgatctggcacggggagactgtgggctgcaccaaggaggagatcaaggagctgacccacatgatccagaggctgatggccaaggtggagaatgccaagtgccaggtatggggcatctgtgcccaaggccagagagacttatggcctaacctttgtcacacagcctatgtgtgccctacgtggatctcagcattcattctccagtccctttgtccatgtagagtccctggttgtggtcagtcagggagtgccaggatgatgaaggcaagaggcctgtttctgaggtgctcccagctgaatggcagactggacatattcaggtaatggacagagagaccgtaacctatcttgttctcttctggtcccccagaactccaagctggaggtggaggtgacccagtctgagcagcagggtgaggtggcccttagcgatgaccgctgcaagctggtcgagctggagggcaccatgcagaaggccaggcagtaccaggaggtgatgaactccaagctgggcctcaatgtgaaggctgcctcttcttgccaacttctagatggtgaggagcagaggtgggtgcagcctgcagagctgggcccagagctcatctgcatagacctgccccactttttagcaccatcacttacccagccctcactactacttctgttttcatcttggaacccttttaggacctctactggtattgagcacagtccaaggagcggagtcttagttgagtccacaggccgatttccaataggctccttgcatgatctattagggacaatggtttgtctcagagaacttgttctctgagataaacaatgccctaatttataacacttaccgatttcagagttgtatatacttctgtcatggctgatttcaggctgttgctgtgacttcatgtagaattggctagaaatgtgcacaataggctcttgtgagctggtgggagctggttcaagaacaacattggttggggctaggatggaatggtgtctcacactgaaagacaaataggaagatatttgtctcttctcttagatgaaaaacctgaggcttagggagactgtgggggttggggagtccgcctggtgtggagttattgggacagttggagagttcttttgtgtcctgctgcattttcacaggctccacttcctggggggatctgggagagcctggcacttgtgttgttttgggacagggttgggacgatgctgggcctttgagggtgctagacccaggtcttccctcctctcactttctgggaagggcttgggtgacctcttggttgactgagttcagagctggtgaccacatggtctctggtgtcattgtcaggaattaatgcccagtgctaaagctgaccttttctctcctgcaccaggctgtgtgatggcatcagtgctgtgaatatctgtgagtaattctggccctgaagggagactctgaggtttgccagtgggacgaattttttagctctgagggtggaaataccaaggaagtggttccattcatt

SEQ ID NO: 367 - DNA, 1925 bp, Homo sapiens
actccaggtcccctatcctgtcctctgcaacccaaacgtccaggaggatcatgacctgcggatcaggatttggtgggcgcgccttcagctgcatctcggcctgcgggccgcgccccggccgctgctgcatcaccgccgccccctaccgtggcatctcctgctaccgcggcctcaccgggggcttcggcagccacagcgtgtgcggaggctttcgggccggctcctgcggacgcagcttcggctaccgctccgggggcgtgtgcgggcccagtcccccatgcatcaccaccgtgtcggtcaacgagagcctcctcacgcccctcaacctggagatcgaccccaacgcgcagtgcgtgaagcaggaggagaaggagcagatcaagtccctcaacagcaggttcgcggccttcatcgacaaggtgcgcttcctggagcagcagaacaaactgctggagacaaagctgcagttctaccagaaccgcgagtgttgccagagcaacctggagcccctgtttgagggctacatcgagactctgcggcgggaggccgagtgcgtggaggccgacagcgggaggctggcctcagagcttaaccacgtgcaggaggtgctggagggctacaagaagaagtatgaggaggaggtttctctgagagcaacagctgagaacgagtttgtggctctgaagaaggatgtggactgcgcctacctccgcaagtcagacctggaggccaacgtggaggccctgatccaggagatcgacttcctgaggcggctgtatgaggaggagatccgcattctccagtcgcacatctcagacacctccgtggttgtcaagctggacaacagccgggacctgaacatggactgcatcattgccgagattaaggcacagtatgacgacattgtcacccgcagccgggccgaggccgagtcctggtaccgcagcaagtgtgaggagatgaaggccacggtgatcaggcacggggagaccctgcgccgcaccaaggaggagatcaatgagctgaaccgcatgatccaaaggctgacggccgaggtggagaatgccaagtgccagaactccaagctggaggccgcggtggctcagtctgagcagcagggtgaggcagccctcagtgatgcccgctgcaagctggccgagctggagggcgccctgcagaaggccaagcaggacatggcctgcctgatcagggagtaccaggaggtgatgaactccaagctgggcctggacatcgagatcgccacctacaggcgcctgctggagggcgaggagcagaggctatgtgaaggcattggggctgtgaatgtctgtgtcagcagctcccggggcggggtcgtgtgcggggacctctgcgtgtcaggctcccggccagtgactggcagtgtctgcagcgctccgtgcaacgggaacgtggcggtgagcaccggcctgtgtgcgccctgcggccaattgaacaccacctgcggagggggttcctgcggcgtgggctcctgtggtatcagctccctgggtgtggggtcttgcggcagcagctgccggaaatgttaggcaccccaactcaagtcccaggccccaggcatctttgcctgccctgccttgcttggcccagtcagtcaggcgcctggagaagtgctcagctacttctcctgcactttgaaagacccctcccactcctggcctcacatttctctgtgtgatcccccacttctgggctctgccaccccacagtgggaaaggccaccctagaaagaagtccgctggcacccataggaaggggcctcaggagcaggaagggccaggaccagaaccttgcccacggcaactgccttcctgcctctccccttcctcctctgctcttgatctgtgtttcaataaattaatgtagccaaaaaaaaaaaaaaaaaa

SEQ ID NO: 368 - DNA, 2108 bp, Homo sapiens
tccattcggacgtctccatcctcagaacctcctctcttccccaaaaagcaccatgacttgtggatcttactgtggtggccgcgccttcagctgcatctcggcctgcgggccgcgccccggccgctgctgcatcaccgccgccccctaccgtggcatctcctgctaccgcggcctcaccgggggcttcggcagccacagcgtgtgcggaggctttcgggccggctcctgcggacgcagcttcggctaccgctccgggggcgtgtgcgggcccagtcccccatgcatcaccaccgtgtcggtcaacgagagcctcctcacgcccctcaacctggagatcgaccccaacgcgcagtgcgtgaagcaggaggagaaggagcagatcaagtccctcaacagcaggttcgcggccttcatcgacaaggtgcgcttcctggagcagcagaacaaactgctggagacaaagctgcagttctaccagaaccgcgagtgttgccagagcaacctggagcccctgtttgagggctacatcgagactctgcggcgggaggccgagtgcgtggaggccgacagcgggaggctggcctcagagcttaaccacgtgcaggaggtgctggagggctacaagaagaagtatgaggaggaggtttctctgagagcaacagctgagaacgagtttgtggctctgaagaaggatgtggactgcgcctacctccgcaaatcagacctggaggccaatgtggaggccctgatccaggagatcgacttcctgaggcggctgtatgaggaggagatccgcgttctccagtcccacatctcagacacctccgtggttgtcaagctggacaacagccgggacctgaacatggactgcatcattgccgagatcaaggcacagtacgatgacattgtcacccgtagccgggctgaggccgagtcctggtaccgcagcaagtgtgaggagatgaaggccacggtgatcaggcacggggagaccctgcgccgcaccaaggaggagatcaacgagctgaaccgcatgatccagaggctgacggctgaggtggagaatgccaagtgccagaattccaagctggaggctgcggtggctcagtctgagcagcagggtgaggcggccctcagcgatgcccgctgcaagttggccgagctggagggtgccctgcagaaggccaagcaggacatggcctgcctgatcagggagtaccaggaggtgatgaactccaagctgggcctggacatcgagatcgccacctacaggcgcctgctggagggcgaggagcagaggctgtgcgaaggcgtcggctcggtgaatgtctgcgtcagcagctcccgcggtggcgttgtctgtggcgatctctgcgcctccactactgcccctgttgtctccaccagagtcagtagcgtccccagcaacagcaacgtggtggtgggcactactaacgcctgcgccccctccgcccgggttggcgtctgcggcggcagctgtaagaggtgctaaggaggctgccgcctccgccagcgcctgtcgccgtcactctccacccagccagtacctcgcgccaggagaacgcgccgcccgcgccggcctcccaatagccgccgcccgctgcctgcactctaagcgctctccccacgtccgctccgggagccatccccggtcgcaggagtccggggagggccgggaggcgccatggtctctctctgtagcctttcctggtagtcaatttgttgtcccgaggattcatctttttcttcctcctaccttctgttttttttttcatgtatgcattggtcttgcctgagctcttcctcaaagcttggaggaacgggggagggcccgggaatgtccctgtctgcacgacctgggactctgcccatgtgcttttgcctgtggaatggagacgcggaccctggatagtggttctatgactctgcgagggacaggcccacgcgtgtggggagaacatctccttccggggctgccctcaagagcttctgaaaaactaatgactctgctgccttctcctttgtctttgtttcactctgtgtttccaataaactcattgtagcgaatcaaaaaaaaaaaaaaaaaa

SEQ ID NO: 369 - DNA, 1883 bp, Homo sapiens
gttccatcctctgccatctactccactgttcagacacctcctaacctccgtcatgacctgtggcttcaactccataggctgtgggttccgccctggaaacttcagctgtgtctctgcctgcgggccccggccaagccgctgctgcatcaccgccgccccctaccgcggcatctcctgctaccgcggcctcaccgggggctttggcagccacagcgtgtgcgggggcttccgcgccggctcctgcggacgcagcttcggctaccgctccgggggcgtgtgcggacccagccccccatgcatcaccaccgtgtcggtcaacgagagcctcctcacgcccctcaacctggagatagaccccaacgcgcagtgcgtgaagcaggaggagaaggagcagatcaagtccctcaacagcagattcgcggccttcatcgacaaggtgcgcttcctggagcagcagaacaagctgctggagacaaagctgcagttctaccaaaactgcgagtgctgccagagtaacctggagcccctgtttgctggctacatcgagactctgcggcgggaggccgagtgcgtggaggctgacagtgggaggctggcctcagagctcaaccacgtgcaggaggtgctggagggctacaagaagaagtatgaagaagaagtagcacttcgagccacagcagagaacgagtttgtggctctaaagaaggatgtggactgtgcctacctccgcaagtcagacctggaggccaacgtggaggccctgatccaggagattgacttcctgaggcggctgtacgaggaggagatccgcattctccaatcccacatctcagacacctccgtggttgtcaagctggacaacagccgggacctgaacatggactgcatcgttgccgagatcaaggcacagtatgatgacattgccacccgtagccgggctgaggccgagtcctggtatcgcagcaagtgtgaggagatgaaggccacagtgatcaggcacggggagaccctgcgccgcaccaaggaggagatcaacgagctgaaccgcatgatccagaggctgacagccgaggtggagaatgccaagtgccagaactccaagctggaagctgcggtggcccagtctgagcagcagggtgaggcggccctcagtgatgcccgctgcaagctggccgagctggagggcgccctgcagaaggccaagcaagacatggcctgcctgatcagggagtaccaggaggtgatgaactccaagctaggcctggatatcgagatcgccacctacaggcgcctgctggagggcgaggagcagaggctgtgtgaaggtgttgaagctgtgaatgtctgtgtcagcagctcccggggtggggttgtgtgcggggacctctgcgtgtcgggctcccggccggtgacgggcagcgtctgcagtgccccctgcaacgggaacctggtggtgagcactggtttgtgcaagccctgtggccagctgaacaccacctgtggagggggctcctgcggccaggggaggtattaagtggcccaaaagagagccaggggagccccttctgcctgccagacgtgccactgccccaccaccagctgaaaacagcagcacatcgctggcttttccccttgtgttctgagaatacaccatcggctcattcccaccagtggctcctccccacctttcatcccactggaaaggggtctgtggctggggaatagacccattccttcccctgtctcagccttcagcccctcccggggagaagggccttgcttccctggaagaagcactgtgagactgttccccctgcctctctggcctcttgtctccccttttccaataaacttgggacctgcaaaaaaaaaaaaaaaaaaaa

SEQ ID NO: 370 - DNA, 13464 bp, Homo sapiens
gcaggttgcagtttcccttgcgttctgcctagcgggagattcctatgctcataaatggcattaataatgttctctgcctttatgttgtcaggaggcctgtcccctgcccaataaaaggcaggagcagtaacaggcctcccatgtgagaccgtgtcatccttcaatcctcagtccaggggactgtcccgcagaacagaggcatggcgagccaatcctgccacatcagctctggctgcggggtcaagaacttcagctcccgctctgccactgtgcccaagcctgggtatcacagctgtgtcagtgccatggcccatcatggggtcagccctggggggctaggctccaggcgcctcggaggctttggcagtcagagcctgtgtacggtggggtctccccggatcgcggtgagttgtagatggcccctacacagcaggggcaggtttggctactgggcagggggcctttgcaggcccagcccaccccgcatcacatctgttaccatcaacgagagcctcctcatgcccctcaacctagagatcgaccccaatgcccagtgtgtgaagcatgaggagaaggagcacatcaggtgtctcaacaagtttgctgccttcattgacaaggtgggtctgtgagctgtttcctgggactgtggcttaggaaggggaaagggacttggaacccgatgatagggtggttctaattctcctgttactgactagcacgtggctgtgagaacgtggctgaatcagggtcttggttttcaaatgttgccatgtcagtcaaatgcaaaatgaatctgaaaccaccagacagaagaggggtgtttgctgctgctgctcacaggcaagcagcaagcatgatgtgtgtgcaccgtccatcttcccgatctcaccggcacgcagtaggacagtgtggcagagcgggccactctgcctaggcctgtctgacctcccgcttagaggagatgctaccgtccctagcatggagcaggagcaggatgcagaggggtcagaggctccttgcctgctcctccgtggtggggacatcataggaaggctgtgaacccttaggacttctgcccgaggcactttataccctgcagcacatgcatagattaaaggcagtgagttgagaaacttaaagcatggtccagggagaggctgttgaattgacttttctgatgctgcagtttcagagtcctcctggttgagtgtatagctctggtttcctttaacctaatgatgccctccctaggagctcacagtctttgggggaggacagccaccaaagtttaaaggaggagaagctcgtcttccagggctgaatggtgtgtatatctacaccctgggactgcataagaaggcacaaaccagggcgatggtgggtggaagttctgctctcagatcaacgctacatcagaagtgggcatatctgcacacagaggtgctgggtgtccattgttaacataccgctggctgtccagattactcttcccttccatcagcacaaagaagctcactgtagagttaggcaggttattcattgcacaaggacacctagcaagagcaggggaggttgaaatccagcccaggctttgcttgcagagccatgtgccctggcagggggctggaggcatcttttcctaatttgctcaaaagcacagtgagaaccctgagagtgcatgctcaaaggggtctctgcatgtggccttttgggcatcacccatgaatgctgctctctccgttgagaggaaccagttctgggtctggggagaggaacttataccactgcaccaggctggcttttccctcccttggggttgctgatggccaccctcttccctccagccttcttcctgcaggctccaaactgcattgagctccagactacaaagtgcattgatatggtgggtttaatcctgccagagggctgtcccatgacctgggtctgcatgttgaaatccaaggcagatgccttttggataatcagagtttttgttccttgtccctcaagcacggacaattggacagttgagggtttgtaccaggcttgtactcccaagaggttagggttggagaagaaatcacctgctttagggctggtaaatgcaaacttcaacgggggcttggtgggtcacatgaatgaagccaaacttgagaggcatgcccacctagagggacagtagctgctgctcactccagccacaggcctacctagccttgccagaacttctggtatgtcaagagggtcagagagatccagattcttacttgaaaccactcagttattaagtgttggcaactaatcagatctctataaaacagtgtgcaaggcaagtaagacatgcctgtgggcctgatagggcctggagctgccagtgtaccactgctaatgtatttctcctgtcttgttttacaatgcaattcagtgagaatgaggcaaagtggtctggttggtggcagagttagagtgagaggtctcctaattcctggtctgggatactctgtcctgggcttcagtgccccagcaccagaggtaaggaagagtcatggtatgtacatttaaaaattgctgttgtacaaatgcccacaaacttagcaacttaaaacaacacaaatttactacctaaaaggctgatgttaaggtgtcggcagggctgcatttctttttggaggccccaggggagcatctgtttccagggacatttaggcttttggcagaattgaggtccttgtggttgcaggactgaggtccctgttctcttgctggctggctgccagaggttgttctcagcttccagaggctatccacattccttggcttgtggccccctcttcctccatcttcaaagccataatagcgggttgagtccttctcatgtttcaaatccctctagtgcaggcacctttggggggatcattatttgcctagtatgcatagtatgaaatatttctgcaggatgttaatttcattctgtgtagaataaacgaacgtttataaatagtgtgctctttctgggaaggggggtgggtggagagaagttacttggggactacttgtgacctgcactttcagactttgccaataatttggcctcctggggaaggtcacaggctgctgcagggcgggggccatcctcaatggcagaaagagctctgggggaccaggcaaaacctgctctcaggctttcccctcagtctctttcctccttcctgaatggcaggtgcgcttcctggagcagcagaacaaactgctggagaccaagctgcagttctaccagaaccgcgagtgctgcgagagcaacctggagcccctgttgcagggctacatggcgactctgcggcgggaggctgagtgcgtggaggccgacagtggcaggctggccttagagctcaactgcacgcaggaggcgctggagggctacaagaagaagtgagcatgacagggctgggatggttctaggcagtggagtcagtcttagctgagatcacacaactcctccagaagctgagactgctgaaggccagggttgccctgacaagctatcagacacttctgctttaccgtctgctttatctcgtgtcagctcctagttcttacacccctgtgctgggggctgggaaaagatttagagaagagttccctgtctgggagggatgggacacacattcagggtacagactgatgcagagatgaagagataggaacaaatgaaacaggaggagcaaggacagcagggctggagaggaggagcccggagcagtcagagctaggacggggggaaagggaaaggccctggagaggtatctgaaaatgaattggctgaagccattccaagtatctgatgaacttggattcttcctttatttattctgcagataaaccatcaggttatcgttctgcagggctccacaattcaaataccaatgtaaatttgggttttcctgagttatttagcttgttcattacctagtctaaactcaccgggtcactgtacttaccttgtagatcagacagagtgaagggtgattttgacctcaatcaatcctggtaattccaaccctgcttgggattcttggaagttcaggttttaccatctggctggacccagcagtgggtcctcatgtcccttggggtgaagcaaatgtagacacaatcctcagtgtgcaggcgtcaaggtctgtctcccactctgggggtgtgcgggctggtaattatagagctgagtgcttactgtagccccaaatgaccatggaattcaaaagttatgaaaacaggccgggcgcagtggctcatgcctgtaatcccagcactctgggaggccgaggtgggtggatcacctgaggtcaggagttcaaggccagcctggccaacatggtgaaaccgcgtctctactaataatacaaaaaaaatttagctgggtgtggtggtgggcgcctgtaatcccagctactcaggaggctgaggcaggagaatcgcttgaacccgggaggtggaggttgcagtgagccgagatcacgccactgcactccagcctgggcaacaagagcgaaactccgtttcaaaaaacaaaataataataaagttatgaaaaccatgctctgggctctgggaactctggtcttctttgtgggggcagggctgctcctgggctacaatctcacaggcaggaggaagagggctgggctgctggaggagggtgggggaatggcttgaagaaggggttgcttctaggaattcaagtccttggatattggggcagggggaataaaacctcatgggggtggcttcatagagctttgtgttttgtacagtgtagaatttaaaggctctgtggaatatctgtctgtttttaaatagttccacaaatatttattgagtgactcactgcacttcaggtgatttagaccaagacacaaagagattaaatgtcttgcttcaggttttgcagcaacttcagttaagctgggaccagataccagggacctggacttcaagtccagtgtccttccaatgggttctttgtggctgggaaatagaagtccagagaggcaaaacctcttctccaaaggcacagagaaaggagaaaaccagggagtttggcacacctgggctctggcctggccaggtcctcagtcccaggggcctttccacctgggttgtttctcctcaggtatgaagaagagctggccctcagggccacagctgagaatgagttcatgatgctgaagaaggtgagtaactgttctcacatgggaagaattaaatcctggacaccggacgctctgatgctgtgggccctgtcaggttcccattagcccaattgttggtggtaaggtactggagcccctggcacaagaaggtgggttagtttggttgcagaagccatcatagagcccatgcaggaatccagacagtgccgatagagccttcataaaaagaaaacctcaccatgctcctgcttgactttttttaaactactggattggctgaaatgttcaattttaattccgtcttggttttttgcgggcattgcctccccctgttatccaagactaggggttggttctcagcttgttaatgatttcaaagtgtgaccatcattcagtgcaattggtgatgatggaaaagccctggggaataaaactgtgaatggtttcccttttgtttcatgttgctgagtgaaagtgcatgtgaatgttctttaacaagtaatgtgcttgcttgccagcctccttatttgtgagtatcacagggtggagtgaaggctggtgacagatctgccaatagaggcttggccttggtctcaggcaggagagtcagctatttgagtgctggtggtttcctggcctgggctctgaggacaacctacagagaggctctgtgactgtcgcatgcttgtactctgtgggtcagtctggctgggaggcagcagcctgacgttctgggccgtggtatgaggcttccttctttggcaaggtcctcggctctccacttcatttccccaagtggtctcatttatgcaatgggaggtaacgtcactggcagacaacaaaggctctgtcccttctagggggtccctgaaggtgaagatcagaagtctaggttagacttgtaagtgaagggtggctgggcagggtcaggccagaggcagagaggtgggccaggaggtggcctcagggcccgctgaggagagccgaggctcaggggcacagcgagggggacaaaggtcactccacatcctcttgtgtctatctccaccaggatgtaggctacacctatctgcacgagacggacctggaggccaacgtgagccgctgaaggaggagtcagtcttcctgcagtccctctacggggaggtaaatctctccccatctctggaagagcaagtgagagaggagacaggggagggtttccttggagtgtggcctgtcctggttcctgggttctaggaaagctgtacattcttgactctcctaggcctggatatttttccttatgtgaccagaggggatttttctcttgttcgggtggaactgggtgatgcccttcctttaagatgatttgaaagaaagtggttaattcccatgtcatgaagtggagatctgacaattaatttattaatttaggtagtgtaaaaacccaagcagataatccaggcctctccctctggccacaatctggttgattagatttgtgcatagagctatagctgatctggattattcaggccccaaggcggggtgagccggggtgacggcatacacataaatccagctctgttgatccctgtattagtagaattccacgttactcattgctttgaggccacagtcccaattccagccttttcctcttagaactacagtttttaaattttcctgacttgctggtagttttctaatttcagagttgggatatttttttttttttttaatttcctgagaagataggatcagaaggggatttggagttgagggcactggttgctgtcttctacaggaaatctgcctccttcaatcacaaatctctgacacctccatggtggtgaagatggacaacagctgggagctcaacatggacttggttgtggcttagatcaaggctcagtatgatgatattgccagctgcagccgggtggaggctgagacctgataccaaaccaaggtagtctggagggcagggcagccccactgagacaggaggatagctgtgagcctcgagtttccctgggaaacgcactcctgcactctagaggggctgccgctgaggtcctgggtagagcagggccagaaggcgggagagctgtggaacagtaggctggctgattgggtcggggacagcagcctctagccattgtttctgcgtgtttgctctcaacctgcagtgcgaggaggtgaaggccacagtgacccaacagggtgagaacctccgcagaaccaaggatgagctcaacgagctgaactgcatgatccagaggctgacggcagaggtggagaacgacaagcagcaggttggggggcgccgagaccccgctccatacacctgccacttcttgtctggttcctgcttccctcctatcttcagggactgctaccatttggagaggcgtgtatttgaactgtgccagagtacactactataatcagcatgcaagggctcctgttccaacacccactattatcaaacttccaaattcttgtggatctgataggtgtaaactggcacctaattgttattttaattttcatttctttggttaagtagtgatatcaaatctttcctcatacacttactagttatttgtattccccttctaagacctgtctactcatatatctgcccatttttctattgtggttccttccttttttcttagtgatttgcagtattcctttgtccattctatctggattgtaagcctttgtcagtacacatattgcaattaactttctctcagtctatcacttgtctgtttgtcctttattgagcccaaatctttaagctggatgtgcccaaatccatcttaagttcttcctttaatggtttagacttagaaggtattgaggtaatagaggtagcctcttaaatttctccccccgttagttttatagttttacctcttgcatttaggtctgtgatccatctgaactttattttttttttttgtatacacagtgagtagggttctaaattaatttttctacatatcataagaaaatagattatgtaatccatcctttcgccagtgatttgtaatactacctccagcacaacacagtgctcccacacatgcctggcttaatctctgtcttctgccttctgagttgctgttcttcatcactgcacaggatgtatcattagtaatttgttgtggttaagacctgagtaatgaaatatgcgagtggtttactttttagatgtgaaattagagaagattcgaagttgtcccgtgataacagtgcttttgttcatttgcttctgatatgctttcttaagcggggtgaagggaggggctgtagttagtgtgtccggagttgttgcacatgggagcttctttcagcaagatgatctcagcaggccaaagagtgagaccctgcacagtggcctttgaatacctgagcttggtgctaattaactgcatagcttagggcaagtcacagctttttggagtcttaatttcttcatttgcataatgggaacaataatgcctgtagtgacaagcttgcagaataactttgaaggtcaaataagataacatctatgaaagtaccttgtaaacgaacaacggtatatacaagtataaggtaatatcactaataatgatcattcctatttcagtgctaacatttcctccctctaatggctcacctgccaaactcaagtcagttttatgataaagtgtacaaaaatgaaggaaaaaaatccaaatgggccatgtccctgcctagttaattttccatttatatgtatttcttttaaatagtattaagtttaaaaattaaccgttttgaatggagataaaataggatgaccaaggccactggagacccaccagagtccccacaacctgcaccctttttaaactccttcccttctgtccatccccacagcgctgcaagctggaggctgcggtggcccagtctgagcagcagggtgaggcagccctcagcaatgcccactgcaagctggctgagctggaggacgccctgcagaaggccaagcaggacatggcctgcatgctcaagcagtaccaggaggtgatgaactccaagctgggcttggacgtggagatcgccacttatcgcaaactgctggagggtgaggagatccggtgaggacaggggctccagggtcccttcaggttcctactcagagctggactgaaatattccaggcagagaatgttcaaactgggaaagactctagaaatcatggactccaaccatgtccccattttgcagatagggaaactgacatcagagaggggaaggggcttgcccaagagcacagccagttaatggctcacctaaaatgtaccagtctctgggctggccaccaatgctcttctccctcctgcacggcccctcaggctggaatctggatctcattccaaggccactactttaccctcttgactgaaaggatgtttctgcaatcagcttcagtgggttcttaaagctggaatcattcagaaaattagttaaaggccatttgatttgggatgtgcaaagaatcctatcaacctagatagcctggtgttcaggaccagggaatagaaatgagcggcacaagttctgtccttgcaaaggaagacaagacagacatacatcagtcctccagagcctggggttagtggcccagggaagctgtcacagaaggaggctgccttctcaacagctgaggagaagctatgctgacaatttgagccaagaattgagggcaggtgaagccagtgtggggcagagtgatgcgtatttacacctgggatggttgcatggtcctctggacttgggacggccacatcgttagagtttctagctgggtcccttcagggcggggaggctagactgggtagtagagtatacaggtgaagagcacaggccatgagcccactctgggttcaaatcccagctctgccacttattagcatgtgacctctttgtacctcagcatcttcagctgtaaaacagagataatcacaaaatccaccttgtaaggctgttgcaggattaagtgagttttaatggaacatagtaagccccagtaggaggaggtgattgtcatgagatgatggccaggctgggctgcccccatgaagagggaactcaaaggcctggttggctttggaaaccttccatgaagcgtcactgatggcagcccggccacgctgctggacttgctccatgcttggctcaagcacacacacttttctgccagcttccttggggctttgggtgaagccactggagttctgtctgcattcggatacttaagcccccaacccactcactagcattcagtgagcagctggcacttgcactgattttcattatgatactaataattaatggattaataactcaatcagaattattagtacacatcccctatccatgtgattttaaagtcaatttagcatattgtgctatgtgtactgtggccattgaccttttaagagactgcctcctcttggcatttaaaatatttaatttaattacataagtaatgctcgctgctgccaatacagaaaataagaaaacaaaagcattcagagccactcaactcagagatagctgtcgccagcattgtggtttgacaggcaccaccacgggcactgtgggttccttgaaagggcacagtcgtaaggctgtggcaatgccagactgagtggcaggaaaccgagccagatgtgtacatcctcactcaaaagatgagtgaagaagtgttttgagctgggcagaatgaggcagggtagagctttcctggggaaaaaggtttgaagtgggaagctacaaaaggggagacagaacagaaagtgcagagaggtgtgagggaggagggagtgtttataaaaagcccactgtagtggtatatatgtctcatcataaataatatccacatattttttgagacagagtctcactctgttgcccaggctggagtgcagtggtgcaatcttggctcattgcaaactcctcttcccggattcgagtgattctcctgcctcagcctcccaagtagctgggactacaagtgcctgccaccatgcctggctaatttttgtatttttagtataaaaagggtttcgccacgttggccagcctagtctcgaattcctaggctcaagtgatccacctccctcagtctcccaaggtgctgggattacaaaaatgaattgtttataatgttggtagcaaacatattggatttccttactatgtgccagtctccattttaggcactttccatgtagaactcaatcgaactttacaataatcctttcaggcaggtattatcacccccattttatgctggagaaattgaggcacagaaaggttaagcgacctgcccaagatcacccagctagtaagccgcacagccagatttaagtccaggcagcctggcttgagagtccaggctcttaaccacaccatactcttcagcctccctctgcattgaatgaaatcagatagatgtctggggtaccatttaaaatcatggtataaaaatgaatctgtttgagtaataggcaagctttttcctgctcagagacgtctagctaggtagcagcagcttccatcaccactttggctttgctggcatttccagccaagggaccaggaggatgcccccctcatctctacttcccagttcaccaaatttccatggctgaaagccaaacatggcataaagtggcattttggatcctgtaagctaacatactcctgtccttttgggatcccagcaagcaggaccaacactgatgctgtctgcagcaggtgggtagcttccccctgcctcttagggcccttcttctccttcagcatggaggagaataggtttggtgcaaaagcagaggaactcagcactaaccgtacactctctcctctccctgcaggctgtgtgaaggcgtgggctcagtcaatatctgtaagttgggtgtgtgtgggcatggctttctggggtttcagcaatcttagtattagattgcatctaactgatgaccaagcctctgtctatggagtggtagacaagggactcctgagctgatgtctctgggatccagacaaactgatgacctcaaatatttgaccatacatggatccatctggaacacccatgaagtctaagttaatgaatggtgcaaattctgaacccctatttggttctgcaaaaatagcttaagccttttagttacacacagaatactactcaagtggtagcatgttctagtaagaaaaaaagctaggtttatattctgatcatgtgggtctctgcaggcaacttgtaaatctctatctaataatccaatgtacacacagcccctgggccaggtgtctgattcccatccctccattcccctcacctctctagcaaccatatttctagatgactcctctagtgtgatctatcagtttttgctcaaagattgtatgaacatgtctcaacatcagcctggtccaagtagagtttggtgtgcaatttgctaaccacactcctgaagaagcagatggcagtgggttcaggtttgcctgtagtttaaaaagactcatgttgctggtccctcagagaaggaagataattaatcattggttctaaaggattctgggtcataacatgtctgagatggaagagaattctgacctgtgtctctgtccacatgtgtgagccattcccagggtggtgtggtctgcggggacctggactccactgcctcctgtggctcagggggtgtggccatcagcagtggtgcactgtgttgcccctctgcagtgggggcctgctccagtgcccaatctgtgcggtttgcatagagggggtgggactctggacggacctgttctgatgggggcagtgtgggttggggagtggaaatcttttctcttgcatgaccaaatgtcagtttagtaatttccccttacagagaacccagaactaactctcctgtttccttcttattggagttaacaatttactttctctgtgtaaaccctgggtttgacattattttcacttccattgcttctccccttccctgtggttcaggaatgaaatagaaaggcttttttttgaatgaatttctcggtcattgtcttccccaattaacttcaggccagcagatgttaaattaagtcctgactgtgtgccagatcctcttggaacggagccagctagagggtgtggagtatgtgggaacatctctgcgctttgccctcggatgacaggggctccagatgctgc

SEQ ID NO: 371 - DNA, 2508 bp, Homo sapiens
agctctccccaccaataaaaggaccagggaggatcagagagagcagaaggatcctgagcctcgcactctgccgcccgcaccaccttccgctgcctctcagactctgctcagcctcacacgatgtcgtgccgctcctacaggatcagctcaggatgcggggtcaccaggaacttcagctcctgctcagctgtggcccccaaaactggcaaccgctgctgcatcagcgccgccccctaccgaggggtgtcctgctaccgagggctgacgggcttcggcagccgcagcctctgcaacctgggctcctgcgggccccggatagctgtaggtggcttccgagccggctcctgcggacgcagcttcggctaccgctccgggggcgtgtgcggacccagccccccatgcatcactaccgtgtcggtcaacgagagcctcctcacgcccctcaacctggagatcgaccccaacgcacagtgcgtgaagcaggaggagaaggagcagatcaagtccctcaacagcaggttcgcggccttcatcgacaaggtgcgcttcctggagcagcagaacaagctgctggagaccaagtggcagttctaccagaaccagcgctgctgcgagagcaacctggagccactgttcagtggctacatcgagactctgcggcgggaggccgagtgcgtggaggccgacagcgggaggctggcctcagagctcaaccatgtgcaggaggtgctggagggctacaagaagaagtatgaagaggaggtggccctgagagccacagcagagaatgagtttgtcgttctaaagaaggacgtggactgtgcctacctgcggaaatcagacctggaggccaatgtggaggccctggtggaggagtctagcttcctgaggcgcctctatgaagaggagatccgcgttctccaagcccacatctcagacacctcggtcatagtcaagatggacaacagccgagacctgaacatggactgcatcatcgctgagatcaaggctcagtatgacgatgttgccagccgcagccgggccgaggctgagtcctggtaccgtagcaagtgtgaggagatgaaggccacggtgatcaggcatggggagaccctgcgccgcaccaaggaggagatcaacgagctgaaccgcatgatccagaggctgacggccgagattgagaatgccaagtgccagcgtgccaagctggaggctgctgtggctgaggcagagcagcagggtgaggcggccctcagcgatgcccgctgcaagctggctgagctggagggcgccctgcagaaggccaagcaggacatggcctgcctgctcaaggagtaccaggaggtgatgaactccaagctgggcctggacatcgagatcgccacctacaggcgcctgctggagggcgaggaacacaggctgtgtgaaggtgtgggctctgtgaatgtctgtgtcagcagctcccgtggtggagtctcctgtgggggcctctcctacagcaccaccccagggcgccagatcacttctggcccctcagccataggcggcagcatcacggtggtggcccctgactcctgtgccccctgccagcctcgttcctccagcttcagctgcgggagtagccggtcggtccgctttgcctagtagagtcatggagccagggcttcctgccaagcacctgcctgcctgcatcactgcactgaatggcatgtgaatggaaaatgtgtgcttgcttccagaatcttctggatgttcctacagagggaaagacctacagagggaaagaccctcgggccgctcccctgcgccttttcatgctagggagatgcatcctagttgtcctcctggcagctgttttcagaggcattcccagcccttcacttaactcctacttagctccaaaatacctgtatccaatttgtattattcccccagctctcagggacaagaccagtcccccagcgtggtggtcagcacggaagctccaccttctgggtggaggcgccatcctaaccatccagccaggccacccacaacccgagaatcagggagaaagtccctccccagcagccccctcctcctggctgggaagaatggtcccccagcaagcacttgcctgttcattcccgttcatgttttgcttctctctcagactgccttcctgcttctgggctaacctgttccagccaggctcctcatgtgacctcgcagttgagaagcccattatcgtggggcatccttttgcctacagcccctggttagggcactttggacaggtcttgctattcagtgaacctttgtacatttcaaagaagactccatggctgctccagatgcccccttgctgggtgcaggtggggactgtccaatgcagagctggcgggacagagagttaagccacttcctgggtctccttcttatgactgtctatgggtgcattgccttctgggttgtctcgatctgtgtttcaataaatgccgctgcaatgcaaaaaaaaaaaaaaaaaaa

SEQ ID NO: 372 - DNA, 2404 bp, Homo sapiens
gctcacccattctacacttgctcttttgctcccaaccaggaagccatcatgtcttgccgctcctaccgagtcagctctggtcaccgggtgggcaacttcagctcttgttcagcaatgacaccacagaacctgaatcgcttccgggccaactctgtctcctgttggagtgggcctggattccggggccttggcagctttggtagtcggagtgtcatcacctttggatcgtactcaccccggatagcagctgtaggctctcggcccatccactgtggagtccgctttggtgctggctgtgggatgggttttggtgatgggagaggtgttggtctggggcctagggctgacagctgtgttggtctgggctttggagctggcagtggcattggctatggctttggtggccctggctttggttacagagttggaggggttggagtcccagcagccccatctatcacagctgtgactgtgaacaagagcctactgacccccctcaacctggagattgaccccaatgcccagagggtgaagaaggatgagaaggagcaaatcaagaccctcaacaacaagtttgcctccttcattgacaaggttcggttcctagagcagcagaataagctcctagagaccaagtggagcttcctccaagagcagaaatgtatcaggagcaatctggagccactcttcgagagctacatcaccaacctgcggaggcagttggaggtgctggtcagtgatcaggcccggctccaggctgagaggaaccacctgcaggatgtcctagagggcttcaagaagaagtatgaagaggaagtggtatgtcgggccaatgctgagaatgagtttgtggctctgaagaaggatgtggatgcagctttcatgaacaagtctgatctcgaggccaacgtggataccctaactcaggaaattgactttctaaaaacgctttacatggaggaaatccagttgctgcagtcgcacatctcagagacgtcggtcattgtgaagatggacaacagccgtgacctgaaccttgatgggatcattgctgaggtcaaggcccagtatgaggaggtggccaggcgcagccgggctgatgctgaggcctggtaccagaccaagtatgaagagatgcaggtgacagctggccaacactgtgacaacctgcgcaacatacggaacgagatcaacgaactgacccgcctgatccagaggcttaaggcagagattgagcacgccaaggctcagcgtgccaagttggaggctgcagtggccgaggccgagcagcagggcgaggcgaccctcagtgatgccaaatgcaagctggcagatctggagtgtgccctgcagcaggccaagcaggacatggcgcggcagctgtgcgagtaccaggagctgatgaatgccaagctgggcctggacatcgagatcgccacctacaggcgcctgctggagggcgaggagagccggctctgtgaaggtgttggaccagtaaacatatccgtcagcagctcccggggcggcctggtgtgcgggcctgagcctttggttgccggctccaccctctcccgcggcggggtcaccttctcaggtagcagcagcgtctgtgccaccagtggggtcctggcttcctgtggccccagcctgggtggagcccgggtcgccccggccactggggacctgctgagcactggcacaaggagtggctccatgctcatcagcgaggcctgtgtccccagcgtcccctgccccctgcccacccaggggggcttcagcagctgcagcggcggccgcagctccagcgtccgctttgtgtccaccaccacctcctgccggaccaagtactgagagcccagccccagacagctgctgcccagagaagaaccagctccacggctcctgcttctgcccccagggttcgtgggctctgggcttgacggtctccagctcccctttctgccaggaagccaccccttagcactcccccgattattctgcctggccccatgtcctcttggaggatttttctgccatgtagatgctccattagcagttccagctaagctggcttctccctgcctcccaatttctgtcctttggatcactcctctccctaaaccccgagatggcttttctcccagtggcttctctccggctgtttctcttcctgggttgttggtgtaactccagcatgcaagtccacgaggtggggtgcaggcggacaggcgggctttgcaatgatccccgtactcctgcccctgctcgtggtgtgaggcccagccctgtccactgcagggttgtgtctgcaagctccaaggaggcctgggggttgggtggggtgggctgcctgtgtgcactactctttgtgttcctgggttttcaataaacttgccaagctcac

SEQ ID NO: 373 - DNA, 2681 bp, Homo sapiens
acatctcagtcctccatccccctaccagataaaaggggggaagctgagcctgacttgatcatcctgccccggttctttcctccagggccgcatttctctgcctctctctcctgccatgtcgtaccactctttccagccaggctccaggtgtggcagtcagagtttcagctcatactcggctgtcatgccccggatggtcacccactatgcagtgagcaaggggccatgccggcccgggggtggtaggggcctccgagctctgggctgccttggctcacggagcctgtgcaacgtgggctttgggaggccccgggtagcctccaggtgtggaggtaccctgcctggcttcgggtaccgactgggagccacctgtgggccttctgcctgcatcacccctgtcaccatcaatgagagcctgctggtcccactggcactggagatagacccgactgtgcagagggtaaagagggatgagaaggagcagatcaagtgcctcaacaaccgtttcgcatctttcatcaacaaggtccgtttcctggagcagaagaacaagctgctggagaccaagtggaacttcatgcagcagcagaggtgctgccagaccaacatcgagcccatcttcgagggctatatcagcgcccttcggcggcagctggactgtgtgtccggggaccgcgtgaggctagagtcagagctctgcagcctccaggctgcactggagggctacaagaaaaaatacgaagaggagctctccctgcgtccctgtgttgagaatgagtttgttgccttgaagaaggacgtggacacagccttcctgatgaaggctgacctggagaccaacgcagaggcactcgtgcaggagatcgacttcctgaaaagcctgtatgaggaggagatctgcctgctccagtctcagatctctgagacctcggtcattgtgaagatggacaacagccgggagctggacgtggacggcatcatcgctgagatcaaggcgcagtatgacgacatcgccagccgcagcaaagccgaagcagaggcctggtaccagtgccggtatgaggagctgagagtcacagctgggaaccactgtgacaacctccgcaaccgtaagaacgagatcctggaaatgaataaactgatccagcggctgcagcaagaaaccgagaatgtcaaagcccagcgctgcaaacttgagggtgccatagctgaggcagagcagcagggcgaggcggctctcaatgatgccaagtgcaagctggcagggctggaggaggctctgcagaaggccaagcaggacatggcctgcctgctcaaggaatatcaggaggtgatgaactccaagctgggcctggacatcgagatcgccacctacaggcgcctgctggagggtgaagagcacaggctgtgcgaaggcatcgggcccgtgaatatctcagtgagcagctccaaaggcgccttcctgtacgagccatgtggggtcagcacgcctgtcctcagcactggcgtcctcaggagcaatgggggctgcagcatcgtgggcactggtgaactctatgtcccctgcgagccccaggggctactgagctgtgggagcgggcggaaatccagcatgacgctaggagctgggggcagctcccccagccacaagcattagcatgatccgagacatccaggagacagagcccctgccccatggccctggatgtcacactcccaccagggctgaagacaaggatgttccaaaaccccacctccctttattgactccacattcccctccagtgttccctccttgagagctgagctgcccctaggacccctcctttgcctcatgagtcaccttccactcacctgtgtgcagaccctcagctaggcccagatggtggggacagacggcagagaaagagcatgcattgctcttaaccgcagaatggcaataacccccaaaaggtcaaatgggcacaccacagttctgctctgtggatcatcccatggaagtttcctcacaaagtcagctcctctcccaccacaggctcacactgcccttactttaggctctcatgcccctaagaaaagtgaatttcctttaacaccgcctgaaacatgcacactgcaaatatcaaaaggagacacccccaaatcccactctaaattccaaagccaagtgccacgatttcaggatcagtcaggacctgccaatgtcctctcagcacagagaatcaagaggtggcctttgggcagtagatttactttctcaggtatgttgaacccaaactgtgagaataaatctttctcctgagctcacattggcaggtgatgtcaggccaatgcctagaacaaagggcaaagggatatggaatgtttactggacagttggaaaaccaaaaacagataccattttctcaatggaatcagttccccctccacccatccccttctgtacatagccgccccttcctgttccccaaccctttagctccttttgctttgagtctgatatgacagtgatgtggggctgccccagctgacttggaggccctggctcaggagctcatagatggaggaggtgtgggctgactacctcccagaagcccctcatgccaagcctgtcccactggggctccagggcctctgccctgaacatctgggcttctgttcaaaataaacctactctgttc

SEQ ID NO: 374 - DNA, 11529 bp, Homo sapiens
cagagtatatggacaactgagtccagattctaggtctagagagatcatgtcagaaagaaaatggacatattaaactttctgccaaggacctcctgcccatttaatggaattcaaaacttcacccagtaatatgatggtggcgtgttcttttcttgaattatcacacatgcacctggttggtgccagcccctctgactcttcctgcttctcccctctccaaacaaaaccatctgtcccccaaccccattgcaccaacatctgcttggctctctatgttccaggttccttccaggctgaggaagaggaggaagagcctgccacctggactctgagatccaggttgtgcagagcctccctgcactgttagggatcccatatcccagagccctctgggaggctcctgcatggaagctctctcagtctcttacctctgactggggcaggtgtggtttctggaacaggagaacaaagtcctggagactaaatggagcttcctgcaaggccaaaaaaccaccagggccaattttgagcccatgtttgatgtccacatcgacaacatgaagcagcagctggactgcctgggtggagggtatgtgaagttggatgtggagttaaagaacatccaggacgtggtaggggacttcaagaacaagtgagcagacgctcagccagtgcctgggccagggtcctgccctggggctccaggggaggtcagagggggcaggagaaacagcctctgctctccagaaatgtccagtctagtggggaaacggaacacacttagggcacagaggtggaatcagaagtaaacataaaagtgtcaagagaactgggacccaccctgtggtcaagaatgctgaggctttagtgaagggctgggattgtagatgatgatacctaacataggtacaaaaagcatgatacacacagcattcttcaaactctgcagataaggaaagtaaggctctgagatagcataccaaagatgacacaaagtggcaactcaggagttaagaatgaatcccatagaatctcactctcacatgaatgcaactaaatctcactgctaatttgcacagtgttcacatattcactctaatccaggcaaagaggctggagaacaaaaaagaaaggacacatttgctgccttctcccaggaccacacacacacacacacacacacacacacacacacacacaccactaaacataatgagatgctcaaatgctcatgcctgtagatacaaatttcttgattttattgtttttacttatttttatttcttatttttctggttctaattatttttaattctcttggtctaaccaaaattagtaactggatcatgagttttggttaacactgtttgtatactctagcacaagttcaggttttagagttgtgctgtccaacatagtagccaggagccagtggccacagatgactatttaagtttaaattaattaaaattaaataaaatttaaaattcagttcctcagtcacacttgccacatttcaggtgttcaatggccacacatggctaatggatcctgtaatgaacacagatacagagcaattctgttatcgtggaaagttctcctggatagcactatagacttcagagtcagtggatttaggatcttggctcaaccacttaatggctgaatgaccttaagaaaactatttaatctctcaaagccccaggttctttatctgttaaaagagacatcaatagtgcccacctcacaagagcattgagattattaaatcaaaacttgcatgtaaggtgcttggtagggttcacagtgcctggcacatagtaagttgttaataagtgttagctatgtttattgtatttatgattaggtacgtgtagtgatacagacgcagacaagagaagcaagtgcagatgggtaatttataacatgtatgcaagcgtggactaacagtgtttcaatacaagaagacttcctggaggagaaggctaaagcttagcattgaaaaggaagaaggcacaggggagggatatggtagggcatctgttgaagagtgtgttcctagtcaatgaccaggcagtgttcctgtggcatcaaagtggcctgtgcagggccaggcgatgcttgcccttcagcagagggactgtgagctgggccacatggaagacgaggacagttgtatggagttaggtgaagaagagacattcagagttcattaaaaggcaactcaaagaaacgatgaggaaaaccaaattgctcttcccagagaacactgagagaaagcacaatactgaaatttcaatggcaagcaagagattttctcagatcctatagagcagcagaggaaatataaaagccaggaagatcctgcttcatgtaagtcatgtgtgatgggactctgtggttttaaaagaatgacaactttccattacatagtagagaaagatcctctgagaggtcatatggctgatgggcagagcagctgagatcaaaaccacagctgtctagcaccacgagggtggggtgtgctgatgcacccaagtaggttgggtggagaatgggtcacctggaacagaagcaaaacttccttcccagagatcagtgagcaggaggcacctccacatgcccctgggggacagacagggtggggttgctgcctacaggtaaattgaagaatgagaaacctttgggggagagggttcctatggtcctgaagtctctgctccttaggccacagttcagtgtgcctgaacagagtgagggaaatgcgagtgttgtacagtgaggggctgccggcctctgacctttctccctgttcctctcctccctgccctgggttggggcaagaccataaaaaaaaaaaaaaaaaaaaaagggaaatgtatatgcccctttatgggacccaaatactccaaggagctgagctgtgagaaaagaaacctcaagtagactgagaggggatctgttttgttgctttgggtttgggttgtgtttggtggtttatttgatttgggatttggggccatgtgtgtcataggagagccaggctacagtggagcatttgctaaggctgctctgcagacccaccattgcctgtccacctccaccctactgctctgacctcactaccagcgcccaatccaaccccaaaccacttcttgatccttcccagaggtatgaagaagaactcaacaggtgcactgaggcagagaatgagtttgtggtgctcaagatgagtggacagagttcctcctgcccagctcccagtggcctcatacaaggccttatttaatttgcacagcaagcctagaagtaggtcttactttaacagtgggaaaactgcaattcagagaggtaaagacacttgcccagggctacctaggtaatcaggagtgagtcaggacccaggactccaaagtctgagctgcaaatcccaacaccagcccccgccgtgtggagtccagtgtggagacaggggaagcaaaacgggccttgtcctgggctgggtctctaggcacccagtcaggctcaggaggacagggcagcccagaagcagctccacggagtcctgggccttcctgcttggtggccagggccagaacagggttgtcctcacaatgtgaggtgatgcaggagacctttcaatgtggcaccagagctgatgggcaggtgggcacccctgaaggccctggtcttcacagagtttggaagttctactccctccctcctctccaagttctaagttctactccatggcctggagtagacagatgctctgtccttgggagctgaagctctcccacctaattcacagacagagggggctggttatccctggaagggtaaggcccagagtgatagcatgttctgtgggacatggatgctgtctacatgaacaaagtggggctggaggccaaagtggatgccctgatggaggagaccaacttcctgagcactttctataaggcggtgagagtgcccggtgccccctccaacaggggggctgggggctgggtcttagagcctcagctgggcacagagcctgtgggctccttccctggtcttctctctgctccttatcccacctgcgtattgcagggcagatgccacttcccctaccacaggagaaaatgaggttccatagagcggctggcaggtcaggagagatgaaaaattcagccttaaccatctggatcaagcatgttctgttgggcaggcagaaaaatggaccacctgtcattaaaatatggatttccatagaactttctgagcaacttggctcatcctgccctgccaaaatttacctgctgctcttcctagagcaactgcagggtgatgcaattacacaaatcaagtggcaattagtgagccctcaggtgcttctgggagcaaacagcacaattgcctggttctccgtttgtgtcctccacagagctgcaggcacagtgctgagcaaatacaacggggcctgtaagttcttgaagcttacagtatagtgcaggagaaaggcacaacagagataatcaaatcactgtactatttcaggccctacagaggcaatgaagagaaatgacagtagaaagcaatcataggcagtgggtgggtgacactggacaagaaacttgaaggaattgagcatgtcagccaggaaggcatggtgggtgggggcagtgctccagcaagaaggaatgggaagtataaatgcccccgggtgtgatccaggaatgccaggaggaggacagtatggctggggcagaggggagagtggtgaagatagggccagcagtgtcaaggtggggtgtagggtgagtggagtgcctccaggtaggcctggtaaggacaggtgatatgcccatagggtcacacacacgtgatgcccaacagaagctggtcacattgttccaggacctggggcttcagctctgattgtttgggtgggctccaattccaccttacaacccacagggggataaccagccccctctctacttgttctcttcaatgctgacaacagggtgatattgcctccgaattctgaactagcccacagccagcaagcctgtgggacaagacctttgaactagatctgctgccaggaaaaactatttgggaaaaacaagccgcagcacaataagaaaataataatttgttgaaacgggaaatgtatgaatcagtcatcaataaagagagaaaaggaatatttttacttagacttctgctttggcctactgattctcaaattttaaagagcatcagaatcttctagaagtgttgctaaacaccaattctgatttagtaagtctgggctgggcccacagtgttgcatttcaatcaagtttccagtgatgctgatgctgatgctggtttgaggtcacattttgagaaccactgagttagatgatcctgaaaatggaccattaacaaattaattgtgggttcactgtttccagaccatcttatctggatgtcatttaatctccacaaattcatttgaggccagtattatgatcagccttgctgagatctgggatgctatttaaatgtgattggcagatacaagactcaaatttgtcagttgggtgccctttctgctatttccagctgatttccatttcccatcctatccccgaggagcagggaggagccaaattgggaaacgcaactggaaagtagccaagttttctggcttcttctgactcagttttctttcacaagatattttccttatttggtgtgaagggctgtattttctcagaacatgagacatctgtgatactgacaggtcacaacatggtgtgctcctgtgacaacagagtggcttctggagaatgctggctggagttacatgtgctgctgctccctccacgcagatgagctgatgacaaagaacagctataaactcaatgacctccctaatgttcttcccagccctttcagcctacacaggccactccatccctaccgtgcaagaccctcaatgccagggtctgttccagggggcagatcacagcctcccaaaacatgcccccacacacacatgcatacacatgctcacacatgcacatgcatgcacacacatacatgcactcgcatgcacatacgaacgcacatgcacacttgcacacacacacacggacacacatgcacatgcacactctgcctcagctctctcatttggacccaaccacaaaagctggctcagcttcaggcccagatctctgaaacctccatggtccttctgttgatggaaaacaactgcaacctggacctggatagcatcatcattgaagtcaaggcccagcatgaagacatcgccaacaacagcagggctgaggctgagttctggtactaaaccaaagtgagacatcaaggtcaagttcattaaacaagcacaaaaaaccgagatttcaaaggcaaacaagataaaagccatgtcctctcagatgtcccagtctgatagggtcaagggatctgagttcagcttggggctcaccctatgttacctgggggaagcatgtcaggacctggggaacagccagataaaggcaggaggtggtcagtccctctgccaagaggaagatggacacacctccaatgccctgtatcagagagaaaagggacagctggacagttccagccatcagtgccaacaggaggaacagagagggagggtggggacaagaggaaagtttaaccccttgtggaggaggctggaggatccagagaagaaaggcggaactggctggggcccaggggctggagggcaaagtcttaatctaagtcacagactgggattttccagatgagagcaaacattctgccctgggagtcgttgggatgataatttgcaatgccgaggaaaacacgaacaaaggaaaagtgattggcacctacctgatgctgaatttgggagggtgagatgcatggtgtcgagggaaagggaagaaagaccaggtataggaagaagggaaagagcacagccacagctgtccagctgtagggtgaagccagtgggcatagaaagtgagggacagagtcaagagaaaatgcagatgaatttgattgggccagaggcggcccagcagggaggctctcagacgcacatgaaagcctatggggctgtgggaagccacagccttctcttccctggcctggctgtccctgcccactgcacgcatcccccatccgaggtctgcttctcctccctcctagtacaaggagctacagcactctgctagcctgcacgggatgacctccacaccaccaagatggagatctctgagataaactggtaatgcagaggctgcactctgagattgataacttgtagaagcaggtagggctgagctcccaggtgtccttccatccatgctcctgcctccaggtggacttgtgcctgggcctcactcagcccctacagagagaagcctcccagatgagtggccttccaggaatataaatatgcattcacctagtgcaatggttaatattgtcaacttgattggattgaagaatgcgagaaaggcactttcttctggaagagtaaatggcaaaactttggcttgctttacttactcgcaatccagaaaagttcagcattgaaaaggacctcagagggctgggtgtggtgactcacgcctgtaatcccagcactttgggaggctgaagagggcggatcacctgaggtcaggagttcgagaccagcctgacgaacatggtgaaatcccgtctccactaaaaatacaaaaattagccaggcatggtggtgcgcgcctataatcccagctactcaggaggctgaggcaggggaatcgcttgaacctgggagatggaggttgcagtgagcagaaatcgtgccagtgcactccaacctgggcgacagagtgaaactccatctcaaaaaaaaaaaaaaaagaaagaaagaaaaggacctcagaacatcattttctccattctggctaagtctcaaactacccaaggtggacagaaatcaatcttagttttaaagatgatgcagctccaacctcctttgcattaaatccacttcagggaattctttcatattttcaacttaaagttcatagaggatcttactgcatcctccatgaacaatgtcacacacattctcatcgccacctggcagtgtgccatgccccaggccaccatcgcctgctgatgccaagcagcatgggaagctggcactaagaacaagctggtggagctggagatagccctgcagaaggccaagcaggacatggcgcagcagctgtgcaggtaccaggagccaatgtatgtcaagctagccccggacattgagatcgccacctacaggaagctgctggagggcttgaagagcaggtgggccacccctcccctcccactaccacccaaacagatgcaccagaccacgacagcaatgccacagaggccccatgagcgccacagtgtcagccctccagatgaagctcccaggtcagaaacagggttaaaatgcaattgctcccttaaaggcgtcctgcagttgcagcccctcccacagctgttggacccagggcaggggtgagggtcaaaggggtcaaggaagggacgctaagcaagaccctttcttcccaagtcctgtgagaaatgcaatcatgcttgggacaaggctcaggggctctggaattgccctgcaagctgacggtctcgcactacctctctaccacagctgcctcttctcatttctctctgtatttgtgactcgttctctctcctggattttcctcacagatgcacttgagcttcccaaggctagcaagctgaggggagagcttgccaagcacagtgcctgatacatgtaagcactctgtgctgataactttaaatacaaagaacccagggccccttaacctctcagcaaacaaaatgactctttctctccctagcggtcacagactcactgaaggtgtcagagccgtcagtacctgtgagtcaatgtcttggaatggtagaaaagtggggggcacaatggaagctgggagcatcactcttgagggtctggtgggtcaaagatgagcaggcaggggcagggatgtcacaaagaccctcttggaggctctatggggactcttcttgtgcccttcttccccatgaggtcaagagaactcaaaaggggcacattccatgtcactaaggagctcaacaactttctcctcactctggcttaatctccacaaaaactgtggcgattaatctgcaggtgacccctcacccccagggctggtcccagaagatcccagtgacaggacaagactattcaaacaatcgtgggtccccagtctgaatgcctgatttctcagctagtgctgtcaggaactcaaactaacacaaataagaggctattaaacagattaaatgtaaaggcctatatttagaattgaagcatatgaattcaacaaatagaacagtgactgatctggcgtggcctcaactcacaggagggagagcagcagtgacctcacagagtgacccaccagggctctggggctgtgtgtaaaagctcagcatcataggcggcattaatgggagcattgagtcctggtcatgggagtagaatccccttgagacccatgtgggtcagatcacattagagaggctggcctgccaggattggggagagcctggaaccaacccatcagaggggcaggaatgcctcaccaggaaaaacggacgccaagaggggaaatcaatgagacgtttccaaatgtttacctggcttgcaaagatgcatccaagtagggagttcccgttgctgaaaatattgaagcagaagctgaacaattgtatcttggcaatgtcattgaggggttctggtactgggggaggctcgtccaggtggccttcaggcctctttcgaaaaggaagtctatggctcccttccagaatacaaggcctcctcttccatccaatgtgacagccgcctacaagacaggggaatgaacccagcacaggagctaaaagccttggcttctggtgggcgtggacttgggtatgccacttgatctctttgcacctcattttttcctctacaaaatgggggttattgtagtaatggtgtcctctcagccccattgagatccacatggtcacagctgtgaatgtgccttgagtatggcgatgccctgtgcagaggttcatgagaaggtagcgtgtgacggggtggtgagtccacgcccaccctctctcacactggctcaggcgttccccgaggctctcagggaagggagggttgcctggaacaaggcattgcgggaggggagcaggcatggggatcacacccaggaagggcgtcgtgggaaatgggaagaacctgccaacatatcctgagccctctctccacagctgaggtctcttcccctggggccacaggctccagtgggggcagcgtcctctgtgtgggtgggggtggccacagcagtggcctctgccacaacaacaggagcagtggcatcagctgtccagctgtgaccagcagtcacagcagctccaacatattcattgtctccaagagatggcccaccaaggagagtcacagcagccatgcacctgcctccactgccactcccctcaagccctcaagcttcccagctccaaggcttgatatttactgacgtcctacacacaaaatcaacagcaggaggtacaaggagcaggaagtggcttatgaggtcatcctgtccatccctctgcctccagaaggtccccacagaggtaccccacctgctcccgatctctgcagggtcctgcagggtccacaggcatccattccaaccaatgttgactcaactgctctgtgccaggacctgggctagcactttgcccttaagaagcttccagagtagggggtgcagtagggtctttcccctcctgtctaagtcagacccacagcaaccacaagacaaggcctcttatgcagtccttcccaggacctcagaactgaccacggtgccccaaagagactaagtgcagtgtgggcccaagtttccacacacctttctcattgcagatggaacagttttcccactcaggccaggacacatcttgcacaccctgccacacatgccacctcctcacctcctttcttccccctgcccaggccccagccaagtcccctgacaactcccaccagcaggatatttgagtgagaaatcaacacccttcaaaatatgatcaactcttgcttattcataatataatggaatgatgttatcaagaactcaaaagccctccatggcccagggctgcaatgaatgagagttcatggccaaatttctgtcaagtctgctttatttaagtcaatattagacctgctgttcctaaacagaaatgccctgatgacagaggagtgggagggaagcaggctcatgtgagggtgtgggaaggccacttggcccaaaatgtttgcaagaaatacaccaggaaaagcctattttaattctcctgcattaggaactgccctgtgagattcctgcaaaataatcctccaggctcaga

SEQ ID NO: 375 - DNA, 2218 bp, Homo sapiens
catggccagcacatccaccaccatcaggagccacagcagcagccgccggggtttcagtgccagctcagccaggctccctggggtcagccgctctggcttcagcagcatctccgtgtcccgctccaggggcagtggtggcctgggtggcgcatgtggaggagctggctttggcagccgcagtctgtatggcctggggggctccaagaggatctccattggagggggcagctgtgccatcagtggcggctatggcagcagagccggaggcagctatggctttggtggcgccgggagtggatttggtttcggtggtggagccggcattggctttggtctgggtggtggagccggccttgctggtggctttgggggccctggcttccctgtgtgcccccctggaggcatccaagaggtcactgtcaaccagagtctcctgactcccctcaacctgcaaattgaccccgccatccagcgggtgcgggccgaggagcgtgagcagatcaagaccctcaacaacaagtttgcctccttcatcgacaaggtgcggttcctagagcagcagaacaaggttctggacaccaagtggaccctgctgcaggagcagggcaccaagactgtgaggcagaacctggagccgttgttcgagcagtacatcaacaacctcaggaggcagctggacagcatcgtgggggaacggggtcgtctggactcggagctgagaaacatgcaggacctggtggaggacctcaagaacaaatatgaggatgaaatcaacaagcgcacagcagcagagaatgaatttgtgactctgaagaaggatgtggatgctgcctacatgaacaaggttgaactgcaagccaaggcagacactcttacagatgagatcaacttcctgagagccttgtatgatgcagagctgtcccagatgcagacccacatctcagacacatccgtggtgctatccatggacaacaaccgcaacctggacctggacagcatcatcgctgaggtcaaggcccaatatgaggagattgctcagaggagcagggctgaggctgagtcctggtaccagacaaagtacgaggagctgcaggtcacagcaggcagacatggggacgacctgcgcaacaccaagcaggagattgctgagatcaaccgcatgatccagaggctgagatctgagatcgaccacgtcaagaagcagtgtgccaacctacaggctgccattgctgatgctgagcagcgtggggagatggccctcaaggatgctaagaacaagctggaagggctggaggatgccctgcagaaggccaagcaggacctggcccggctgctgaaggagtaccaggagctgatgaacgtcaagctggccctggacgtggagatcgccacctaccgcaagctgctggagggcgaggagtgcaggctgaatggcgaaggcgttggacaagtcaacatctctgtagtgcagtccaccgtctccagtggctatggcggtgccagcggtgtcggcagtggcttaggcctgggtggaggaagcagctactcctatggcagtggtcttggcgttggaggcggctttagttccagcagcggcagagccactgggggtggcctcagctctgttggaggcggcagttccaccatcaagtacaccaccacctcctcctccagcaggaagagctacaagcactgaagtcgtgccgccagctctcagtcccacagctctcaggcccctctctggcagcagagccctctcctcaggttgcttgtcctcccctggcctccagtctcccctgccctcccgggtagagctgggatgccctcacttttcttctcatcaatacctgttccactgagctcctgttgcttaccatcaagtcaacagttatcagcactcagacatgcgaatgtcctttttagttcccgtattattacaggtatctgagtctgccataattctgagaagaaaaatgacctatatccccataagaactgaaactcagtctaggtccagctgcagatgaggagtcctctctttaattgctaaccatcctgcccattatagctacactcaggagttctcatctgacaagtcagttgtcctgatcttctcttgcagtgtccctgaatggcaagtgatgtaccttctgatgcagtctgcattcctgcactgctttctctgctctctttgccttcttttgttctgttgaataaa

SEQ ID NO: 376 - DNA, 1986 bp, Homo sapiens
cgcgccaacgctcgccacagccctctcatctcctggaaccatggccagcacatccaccaccatcaggagccacagcagcagccgccggggtttcagtgccaactcagccaggctccctggggtcagccgctctggcttcagcagcatctccgtgtcccgctccaggggcagtggtggcctgggtggtgcatgtggaggagctggctttggcagccgcagcttatatggcctggggggatccaagaggatctccattggagggggcagctgtgccatcagtggcggctatggcagcagagccagaggcagctatggctttggtggcgccgggagtggatttggtttcggtggtggagccggcattggctttgatctgggtggtggagccggccttgctggtggctttgggggccctggcttccctgtgtgcccccctggaggcatccaagaggtcactgtcaaccagagtctcctgactcccctcaacctgcaaattgaccccgccatccagcgggtgcgggccgaggagcgtgagcagatcaagaccctcaacaacaagtttgcctccttcatcgacaaggtgcggttcctagagcagcagaacaaggttctggacaccaagtggaccctgctgcaggagcagggcaccaagactgtgaggcagaacctggagccgttgttcgagcagtacatcaacaacctcaggaggcagctggacaacatcgtgggggaacggggccgcctggactcggagctgagaaacatgcaggacctggtggaggacctcaagaacaaatatgaggatgaaatcaacaagcgcacagcagcagagaatgaatttgtgactctgaagaaggatgtggatgctgcctacatgaacaaggttgaactgcaagccaaggcagacactctcacagatgagatcaacttcctgagagccttgtatgatgcagagctgtcccagatgcagacccacatctcagacacatccgtggtgctatccatggacaacaaccgcaacctggacctggacagcatcatcgctgaggtcaaggcccaatacgaggagattgctcagaggagccgggctgaggctgagtcctggtaccagaccaagtacgaggagctgcaggtcacagcaggcagacatggggacgacctgcgcaacaccaagcaggagattgctgagatcaaccgcatgatccagaggctgagatctgagatcgaccatgtcaagaagcagtgtgccagcctgcaggctgccattgctgatgctgagcagcgtggggagatggccctcaaggatgctaagaacaagctggaagggctggaggatgccctgcagaaggccaagcaggacctggcccggctgctgaaggagtaccaggagctgatgaatgtcaagctggccctggacgtggagatcgccacctaccgcaagctgctggagggcgaggagtgcaggctgaatggcgaaggcattggacaagtcaacgtctctgtagtacagtccaccatctccagtggctatggcggtgccagtggtgtcggcagtggcttaggcctgggtggaggaagcagctactcctatggcagtggtcttggcattggaggtggcttcagttccagcagtggcagagccattgggggtggcctcagctctgttggaggcggcagttccaccatcaagtacaccaccacctcctcctccagcaggaagagctacaagcactaaagtgctgcctccagctctcggtcccacagtcctcaggcccttctctggctgcagagccgtcttctcaggttgcctgtcgtctcctggcctctagtcttccctgctctccgaggtagagctgggtatggatgcttagtgccctcacttctctctgtctatacctgccccatctgagcacccattgctcaccatcagatcaacctttgattttacatcataatgtattcaccactggagcttcactttgttac

SEQ ID NO: 377 - DNA, 2222 bp, Homo sapiens
catggccagcacatccaccaccatcaggagccacagcagcagccgccggggtttcagtgccaactcagccaggctccctggggtcagccgctctggcttcagcagcatctccgtgtcccgctccaggggcagtggtggcctgggtggtgcatgtggaggagctggctttggcagccgcagcttatatggcctggggggatccaagaggatctccattggagggggcagctgtgccatcagtggcggctatggcagcagagccagagcgagctatggctttggtggcgccgggagtggatttggtttcggtggtggagccggcattggctttgatctgggtggtggagccggccttgctggtggctttgggggccctggcttccctgtgtgcccccctggaggcatccaagaggtcactgtcaaccagagtctcctgactcccctcaacctgcaaattgaccccgccatccagcgggtgcgggccgaggagcgtgagcagatcaagaccctcaacaacaagtttgcctccttcatcgacaaggtgcggttcctggagcagcagaacaaggttctggaaacaaagtggaccctgctgcaggagcagggcaccaagactgtgaggcagaacctggagccgttgttcgagcagtacatcaacaacctcaggaggcagctggacagcattgtcggggaacggggccgcctggactcagagctcagaggcatgcaggacctggtggaggacttcaagaacaaatatgaggatgaaatcaacaagcgcacagcagcagagaatgaatttgtgactctgaagaaggatgtggatgctgcctacatgaacaaggttgaactgcaagccaaggcagacactctcacagacgagatcaacttcctgagagccttgtatgatgcagagctgtcccagatgcagacccacatctcagacacatctgtggtgctgtccatggacaacaaccgcaacctggacctggacagcatcatcgctgaggtcaaggcccaatatgaggagattgctcagagaagccgggctgaggctgagtcctggtaccagaccaagtacgaggagctgcaggtcacagcaggcagacatggggacgacctgcgcaacaccaagcaggagattgctgagatcaaccgcatgatccagaggctgagatctgagatcgaccacgtcaagaagcagtgcgccaacctgcaggccgccattgctgatgctgagcagcgtggggagatggccctcaaggatgccaagaacaagctggaagggctggaggatgccctgcagaaggccaagcaggacctggcccggctgctgaaggagtaccaggagctgatgaatgtcaagctggccctggacgtggagatcgccacctaccgcaagctgctggagggtgaggagtgcaggctgaatggcgaaggcgttggacaagtcaacatctctgtggtgcagtccaccgtctccagtggctatggcggtgccagtggtgtcggcagtggcttaggcctgggtggaggaagcagctactcctatggcagtggtcttggcgttggaggtggcttcagttccagcagtggcagagccattgggggtggcctcagctctgttggaggcggcagttccaccatcaagtacaccaccacctcctcctccagcaggaagagctataagcactaagtgcgtctgctagctctcggtcccacagtcctcaggcccctctctggctgcagagccctctcctcaggttgcctgtcctctcctggcctccagtctcccctgctgtcccaggtagagctggggatgaatgcttagtgccctcacttcttctctctctctctataccatctgagcacccattgctcaccatcagatcaacctctgattttacatcatgatgtaatcaccactggagcttcactgttactaaattattaatttcttgcctccagtgttctatctctgaggctgagcattataagaaaatgacctctgctccttttcattgcagaaaattgccaggggcttatttcagaacaacttccacttactttccactggctctcaaactctctaacttataagtgttgtgaacccccacccaggcagtatccatgaaagcacaagtgactagtcctatgatgtacaaagcctgtatctctgtgatgatttctgtgctcttcactctttgcaattgctaaataaa

SEQ ID NO: 378 - DNA, 2270 bp, Homo sapiens
ctcctccagcctctcacactctcctcagctctctcatctcctggaaccatggccagcacatccaccaccatcaggagccacagcagcagccgccggggtttcagtgccaactcagccaggctccctggggtcagccgctctggcttcagcagcgtctccgtgtcccgctccaggggcagtggtggcctgggtggtgcatgtggaggagctggctttggcagccgcagtctgtatggcctggggggctccaagaggatctccattggagggggcagctgtgccatcagtggcggctatggcagcagagccggaggcagctatggctttggtggcgccgggagtggatttggtttcggtggtggagccggcattggctttggtctgggtggtggagccggccttgctggtggctttgggggccctggcttccctgtgtgcccccctggaggcatccaagaggtcaccgtcaaccagagtctcctgactcccctcaacctgcaaatcgatcccaccatccagcgggtgcgggctgaggagcgtgaacagatcaagaccctcaacaacaagtttgcctccttcatcgacaaggtgcggttcctggagcagcagaacaaggttctggaaacaaagtggaccctgctgcaggagcagggcaccaagactgtgaggcagaacctggagccgttgttcgagcagtacatcaacaacctcaggaggcagctggacagcattgtcggggaacggggccgcctggactcagagctcagaggcatgcaggacctggtggaggacttcaagaacaaatatgaggatgaaatcaacaagcgcacagcagcagagaatgaatttgtgactctgaagaaggatgtggatgctgcctacatgaacaaggttgaactgcaagccaaggcagacactctcacagacgagatcaacttcctgagagccttgtatgatgcagagctgtcccagatgcagacccacatctcagacacatctgtggtgctgtccatggacaacaaccgcaacctggacctggacagcatcatcgctgaggtcaaggcccaatatgaggagattgctcagagaagccgggctgaggctgagtcctggtaccagaccaagtacgaggagctgcaggtcacagcaggcagacatggggacgacctgcgcaacaccaagcaggagattgctgagatcaaccgcatgatccagaggctgagatctgagatcgaccacgtcaagaagcagtgcgccaacctgcaggccgccattgctgatgctgagcagcgtggggagatggccctcaaggatgccaagaacaagctggaagggctggaggatgccctgcagaaggccaagcaggacctggcccggctgctgaaggagtaccaggagctgatgaatgtcaagctggccctggacgtggagatcgccacctaccgcaagctgctggagggtgaggagtgcaggctgaatggcgaaggcgttggacaagtcaacatctctgtggtgcagtccaccgtctccagtggctatggcggtgccagtggtgtcggcagtggcttaggcctgggtggaggaagcagctactcctatggcagtggtcttggcgttggaggtggcttcagttccagcagtggcagagccattgggggtggcctcagctctgttggaggcggcagttccaccatcaagtacaccaccacctcctcctccagcaggaagagctataagcactaaagtgcgtctgctagctctcggtcccacagtcctcaggcccctctctggctgcagagccctctcctcaggttgcctgtcctctcctggcctccagtctcccctgctgtcccaggtagagctggggatgaatgcttagtgccctcacttcttctctctctctctataccatctgagcacccattgctcaccatcagatcaacctctgattttacatcatgatgtaatcaccactggagcttcactgttactaaattattaatttcttgcctccagtgttctatctctgaggctgagcattataagaaaatgacctctgctccttttcattgcagaaaattgccaggggcttatttcagaacaacttccacttactttccactggctctcaaactctctaacttataagtgttgtgaacccccacccaggcagtatccatgaaagcacaagtgactagtcctatgatgtacaaagcctgtatctctgtgatgatttctgtgctcttcactgtttgcaattgctaaataaa

SEQ ID NO: 379 - DNA, 2301 bp, Homo sapiens
tcgacagctctctcgcccagcccagttctggaagggataaaaagggggcatcaccgttcctgggtaacagagccaccttctgcgtcctgctgagctctgttctctccagcacctcccaacccactagtgcctggttctcttgctccaccaggaacaagccaccatgtctcgccagtcaagtgtgtccttccggagcgggggcagtcgtagcttcagcaccgcctctgccatcaccccgtctgtctcccgcaccagcttcacctccgtgtcccggtccgggggtggcggtggtggtggcttcggcagggtcagccttgcgggtgcttgtggagtgggtggctatggcagccggagcctctacaacctggggggctccaagaggatatccatcagcactagaggaggcagcttcaggaaccggtttggtgctggtgctggaggcggctatggctttggaggtggtgccggtagtggatttggtttcggcggtggagctggtggtggctttgggctcggtggcggagctggctttggaggtggcttcggtggccctggctttcctgtctgccctcctggaggtatccaagaggtcactgtcaaccagagtctcctgactcccctcaacctgcaaatcgaccccagcatccagagggtgaggaccgaggagcgcgagcagatcaagaccctcaacaataagtttgcctccttcatcgacaaggtgcggttcctggagcagcagaacaaggttctggacaccaagtggaccctgctgcaggagcagggcaccaagactgtgaggcagaacctggagccgttgttcgagcagtacatcaacaacctcaggaggcagctggacagcatcgtgggggaacggggccgcctggactcagagctgagaaacatgcaggacctggtggaagacttcaagaacaagtatgaggatgaaatcaacaagcgtaccactgctgagaatgagtttgtgatgctgaagaaggatgtagatgctgcctacatgaacaaggtggagctggaggccaaggttgatgcactgatggatgagattaacttcatgaagatgttctttgatgcggagctgtcccagatgcagacgcatgtctctgacacctcagtggtcctctccatggacaacaaccgcaacctggacctggatagcatcatcgctgaggtcaaggcccagtatgaggagattgccaaccgcagccggacagaagccgagtcctggtatcagaccaagtatgaggagctgcagcagacagctggccggcatggcgatgacctccgcaacaccaagcatgagatcacagagatgaaccggatgatccagaggctgagagccgagattgacaatgtcaagaaacagtgcgccaatctgcagaacgccattgcggatgccgagcagcgtggggagctggccctcaaggatgccaggaacaagctggccgagctggaggaggccctgcagaaggccaagcaggacatggcccggctgctgcgtgagtaccaggagctcatgaacaccaagctggccctggacgtggagatcgccacttaccgcaagctgctggagggcgaggaatgcagactcagtggagaaggagttggaccagtcaacatctctgttgtcacaagcagtgtttcctctggatatggcagtggcagtggctatggcggtggcctcggtggaggtcttggcggcggcctcggtggaggtcttgccggaggtagcagtggaagctactactccagcagcagtgggggtgtcggcctaggtggtgggctcagtgtggggggctctggcttcagtgcaagcagtggccgagggctgggggtgggctttggcagtggcgggggtagcagctccagcgtcaaatttgtctccaccacctcctcctcccggaagagcttcaagagctaagaacctgctgcaagtcactgccttccaagtgcagcaacccagcccatggagattgcctcttctaggcagttgctcaagccatgttttatccttttctggagagtagtctagaccaagccaattgcagaaccacattctttggttcccaggagagccccattcccagcccctggtctcccgtgccgcagttctatattctgcttcaaatcagccttcaggtttcccacagcatggcccctgctgacacgagaacccaaagttttcccaaatctaaatcatcaaaacagaatccccaccccaatcccaaattttgttttggttctaactacctccagaatgtgttcaataaaatgcttttataatat

SEQ ID NO: 380 - DNA, 2255 bp, Homo sapiens
ccttcctccctcctgcatctgagctttgtctccaccagcaacatgagccgccaattcacctgcaagtcgggagctgccgccaaggggggcttcagtggctgctcagctgtgctctcagggggcagctcatcctccttccgggcagggagcaaagggctcagtgggggctttggcagccggagcctctacagcctggggggtgtccggagcctcaatgtggccagtggcagcgggaagagtggaggctatggatttggccggggccgggccagtggctttgctggaagcatgtttggcagtgtggccctggggcctgtgtgcccaactgtatgcccacctggaggcatccaccaggttaccgtcaatgagagcctcctggcccccctcaacgtggagctggaccccgagatccagaaagtgcgtgcccaggagcgagagcagatcaaggctctgaacaacaagttcgcctccttcatcgacaaggtgcggttcctggagcagcagaaccaggtactggagaccaagtgggagctgctgcagcagctggacctgaacaactgcaagaacaacctggagcccatcctcgagggctacatcagcaacctgcggaagcagctggagacgctgtctggggacagggtgaggctggactcggagctgaggaatgtgcgggacgtagtggaggactacaagaagaggtatgaggaggaaatcaacaagcggacagcagcagagaacgagtttgtgctgctcaagaaggatgtggatgctgcttacgccaataaggtggaactgcaggccaaggtggaatccatggaccaggagatcaagttcttcaggtgtctctttgaagccgagatcactcagatccagtcccacatcagtgacatgtctgtcatcctgtccatggacaacaaccggaacctagacctggacagcatcattgacgaagtccgcacccagtatgaggagattgccttgaagagtaaggccgaggctgaggccctgtaccagaccaagttccaagagcttcagctggcagctggcaggcatggggacgacctcaaaaacaccaagaatgaaatctcggagctcactcggctcatccagagaatccgctcagagatcgagaacgtgaagaagcaggcttccaacctggagacagccatcgctgatgctgagcagcggggagacaacgccctgaaggatgcccgggccaagctggacgagctggagggcgccctgcaccaggccaaggaggagctggcgcggatgctgcgcgagtaccaggagctcatgagcctgaagctggccctggacatggagatcgccacctatcgcaagctactggagagcgaggagtgcaggatgtcaggagaatttccctcccctgtcagcatctccatcatcagcagcaccagtggcggcagtgtctatggcttccggcccagcatggtcagcggtggctatgtggccaacagcagcaactgcatctctggagtgtgcagcgtgagaggcggggagggcaggagccggggcagtgccaacgattacaaagacaccctagggaagggttccagcctgagtgcaccctccaagaaaaccagtcggtagagaagactgccccgggccccgcctcattccatgacccggctctggatcccacactgtacttcccacagcccactctcagctccatctccaccctgctggtcctgctcccatacacctggcactggccttggccacccacttctcccagcctgtgtcttcctgatcctgggaaggcctggatgaccaagcttggtgaaattcctccctgtacacaccctattaactccttggctgtggtcccccagctacaccaccagcccaggtcctggctgccagctttcctcctctgcccggcctctagcgcagtcgctaactactctgctgggctccctgggtctctgcccaaggccccgcacacactgggacctagcatagttcctgcctatgccaggagctggctctgtgtttaagaaaaggaggactgaaggacaaacaaccaagagtggcccagtccccacccccacatctagctcagtctcaaatctgagtgggaccaagtgcaattcagggcctttttctccactcacctgcacccagaagcagagaaaagcaggcactgttcacttttcctttattcttaatggccttcctctgttgcaacctcaataaacagcacaatctcaaaaaaaaaaaaaaaaaaa

SEQ ID NO: 381 - DNA, 2856 bp, Homo sapiens
ccttggagactgcttttctccagctctgtcaactcaacctttcccaccatgagtcggcaactgaacatcaagtccagtggtgacaagggcaacttcagtgtgcattcggcagtggtgccaaggaaggctgtgggtagcctggcttcttactgtgcagctggcagaggggctggcgctggctttggcagtcggagcctctatagccttggagggaatcggcgtatttctttcaatgtggctggtggcggcgttcgggctggaggttacggcttcaggcctggctctgggtatggagggggccgggccagtggctttgctggcagtatgtttggcagtgtggccctggggcctgcatgtttgtctgtgtgcccacctgggggcatccaccaggtcactgtcaacaagagcctcttggcccccctcaacgtggagctggaccctgagatccagaaggtgcgcgcccaggagcgggaacagatcaaggtgctgaacgacaagttcgcctccttcattgacaaggtacgcttcctagagcagcagaaccaggttctagaaaccaagtgggagctgctgcagcagctggacctgaacaactgcaagaagaacctggagcccatccttgagggctacatcagcaacctgcggaagcagctggagacactgtctggggacagggtgaggctggactcggagctgagaagcatgagggatctggtggaggactataagaagagatatgaggtggagattaaccggcgcacaacagcagagaatgagtttgtggtgcttaagaaggatgcagatgcagcctacgcagtcaaggtggagcttcaggccaaagtggactcactggacaaagacatcaagttcctcaagtgtctgtatgatgcagagatcgctcagatccagactcacgccagtgagacctctgtcatcctgtccatggacaacaaccgggacctggaccttgacagcatcatcgctgaggtccgcatgcattatgaggagatcgccctgaagagcaaggccgaggccgaggccctgtaccagaccaagatccaggagctgcagctggcagccagtcggcatggtgacgacctgaaacacaccaggagcgagatggtggagctgaaccggctcatccagaggatccggtgtgagatcgggaatgtgaagaagcagcgtgccagcctggagacggccatcgctgacgctgagcagcggggagacaatgccctgaaggatgcccaggccaagctggatgagctggagggcgccctgcaccaggccaaggaggagctggcgcggatgctgcgcgagtaccaggagctcatgagcctgaaactggccctggacatggagattgccacctaccgcaagctgctggagggcgaggagtgcaggatgtctggtgagaatccatcctctgtgagcatctctgtcatcagcagtagcagctacagctaccaccaccccagctctgcgggtgttgaccttggggccagcgctgtggcaggcagctctggcagcacccagagcgggcagaccaagaccacagaggcgcgagggggagacctcaaggacacccagggcaagagcaccccagccagcatcccagcaaggaaagccacccgctagacccatggcctcacccacctcagcacttggaagaagaggtgactttgccacccccaaaggtgtctgccacacccaagttcccaggccctgagttttaaaactgtctgtagtacactcaactgtctgcatcgtggtttagcttttactttcaagctctgattgacacagtcaccttccctgtttccttaggtcccatgtggactaacgacttctcattttcctcgctgcctttggctggcaggaggctttggaggcacaagccattataaccttcttggccctaaggaagctgtgatcatccctagaaagagggaaggagcaggagacgacaggggaggggctggtttgttctgtgcttaggccaagttagctactgtctgagaggttttacatcccctgccagcatggtggggtgacacgagacctgtaagcaggtggtgagaagttagacagcctttacttgctccatcagaaacaactttgcaggatgacgccaatatttaggacaccacgtgtacatctgtagaccaccagctgcacccatctccacaaagccaagtgaaggtgtattggggattctctgccagcctgtgtcacccacccacctccttcattatcagcaatagctaccatcatttgtcaagcacctactagatgccagacaccctacacatattgcctcctattctcatccattcctgcaaagaagatgcaatgagcatccttggaacagactgggagcctgatcccaagaggctgctgaactggccccagtcacccacctatgtgccagagtcaggcctggccgacacaaggatctatgctttttctgtggtgtgtcactgcctttttaacaaaagggctgtcaaagtcaccattctttttgatgagggcagcgtaattacattgccttttgtcaggactgtgggtatgtgatttgtcttccacagtctctctggggctgtgtcctacatagcttctgactctcaatttttggtgccatgagctgagctcagtgagtggagctggcttttctgtcgctgagtggtactgcctagtccagatgtcgtggctcagggtgtaaatattcctaagaatggcagcatctatttcctcttttgtttgaattaaagactctgaatttctgctgaaaaaaaaaaaaaaaaaaaaaaaaaaaaaaaaaaaaaaaaaaaaaaaaaaaaaaaaaaaaaaaaaaaa

SEQ ID NO: 382 - DNA, 1985 bp, Homo sapiens
gcggctgtttgcgccccttctgcctcccgcgcggccagcaccggtacttgcgagccatgagccgccaactgacccatttcccccgcggggagcgcctgggcttcagcggttgctccgcggtcctctctggcgggatcggcagcagctccgcctcattccgggcccgggtcaagggctcggcctcctttggcagcaagagcctctcctgccttgggggcagccgaagcctggcgctcagcgctgctgcacggcggggcggcggccgcctgggcggcttcgtgggcaccgccttcggcagcgccgggctggggcccaagtgtccctccgtgtgcccacccgggggcatccctcaggtcaccgtcaacaagagcctcctggccccgctcaacgtggagatggaccccgagatccagagggtgcgcgcccaggagcgggagcagatcaaggcgctaaacaacaagttcgcctccttcatcgacaaggtgcggttcctggagcagcagaatcaggtgctagagaccaagtggaacctcctacagcagctggacttgaacaactgcaggaagaacctggagcccatttatgagggctacatcagcaacctgcagaagcagctggagatgctgtctggggacggggtgaggctggattcggagctgaggaacatgcaggatttggtggaggactacaagaagaggtatgaggtggagattaacagacgcacagctgctgagaatgagtttgtggtgctcaagaaggacgtggatgctgcttacatgaataaggttgagctccaggccaaggtggactccttgacagatgagattaaattcttcaagtgcctttatgaaggggagatcactcagatccagtcccacatcagcgacacgtccatcgtcctgtcaatggacaacaaccgggatctggacctggacagcatcattgccgaggtccgtgcccagtacgaggagattgccctaaagagcaaggccgaggctgagaccctgtaccagaccaagatccaggagctgcaggtcacagcaggccagcatggggatgacctcaagctcaccaaggctgaaatctctgagctcaaccgcctgatccagaggatccgctcagagatagggaatgtgaagaagcagtgtgccgatctggagacggccatcgccgacgctgaacagcggggggactgcgccctgaaagatgcccgggccaagctggatgagctggagggcgccctgcaccaggccaaggaggagctggcacggatgctgcgtgagtaccaggagctcgtgagcctgaagctggccctggatatggagatcgccacctaccgcaagctgctggagagcgaggagtgcaggatgtctggcgaatatccaaattctgtgagcatctccgtcatcagcagcaccaatgctggggcaggaggggctggcttcagcatgggctttggcgcctcaagcagttatagctacaaaactgcagctgcagacgtcaagaccaaaggcagctgtggcagtgagctcaaggatccccttgccaaaacctcggggagcagctgtgccaccaaaaaggcctccagatgatggacaagtggttggctctgtgagcagaaggcttcccaactcacccgtctcctccctctccttccctgggctccctttccaagtcaagaaatgctttgtctgtcactacagtcccaaccccatttcctctccctgttgtcctcaaggtgtgatgcttcgatgcaaggagtccagtcaggagctctctcagtggcctccttcttggtcccgtttcgttgggtcattgcctgaaatgcaaagacaacacttacccaggatgtttccccaaggccagctacaagcccctctgcccccatgcctttcttgggccttcactaccaagggactctcttcatcttctgattgggattgtgtccagtcctctgcttcttctgcaataaatgattaaatctg

SEQ ID NO: 383 - DNA, 2323 bp, Homo sapiens
tcagcatcttatccccactttctggcctccccaccatgagccgccaattcacctacaagtcgggagctgctgccaaggggggcttcagcggctgctccgctgtgctctcagggggcagctcatcctcctaccgagcagggggcaaagggctcagtggaggcttcagcagtcggagcctttacagcctggggggtgcccggagcatctctttcaatgtggccagtggcagtgggtgggcaggaggctatggatttggccggggccgggccagtggctttgctggcagcatgtttggcagtgtggccttggggtccgtgtgtccgtcgttgtgcccgcccgggggtatccatcaggtcaccatcaacaagagcctcctggcacccctgaacgtggagctggaccctgaaatccagaaagtgcgtgcccaggagcgggagcagatcaaggtgctgaacaacaagttcgcctccttcattgacaaggtgcggttcctggagcagcagaaccaggtgctggagaccaagtgggagctgctacagcagctggacctgaacaactgcaagaataacctggagcccatccttgagggctacatcagcaacctgcggaagcagctggagacgctgtctggggacagggtgaggctggactcggagctgaggagcgtgcgcgaagtggtggaggactacaagaagaggtatgaagaagaaataaacaagcgcacaactgctgagaatgaatttgtggtgcttaagaaggacgtggacgcagcttacacgagcaaagtggagctgcaggccaaggtggatgccctggatggagaaatcaagttcttcaagtgtctgtacgagggggagactgctcagatccagtcccacatcagcgacacgtccatcatcctgtccatggacaacaaccggaacctggacctggacagcatcattgctgaggtccgtgcccagtatgaggagatcgcccggaagagcaaggccgaggccgaggccctgtaccagaccaagttccaggagctgcagctagcagccggccggcatggggatgacctgaaacacaccaaaaatgagatctcagagctgacccgtctcatccaaagactgcgctcggagattgagagtgtgaagaagcagtgtgccaacctggagacggccatcgctgacgccgagcagcggggggactgtgccctcaaggatgccagggccaagctggatgagctggagggcgccctgcagcaggccaaggaggagctggcacggatgctgcgcgagtaccaagagcttttgagcgtgaagctgtccctggatattgagatcgccacctaccgcaagctgctggagggcgaggagtgcaggatgtccggagaatataccaactccgtgagcatttcggtcatcaacagctccatggccgggatggcaggcacaggggctggctttggattcagcaatgctggcacctacggctactggcccagctctgtcagcgggggctacagcatgctgcctgggggctgtgtcactggcagtgggaactgtagcccccgtggggaagccaggaccaggctggggagtgcaagtgaattcagggactcccagggaaagaccttagctctaagctcacccaccaaaaaaaccatgagataaaagtgcaacacagcccatttcccagtagtctgccttgccctggcagactgctccggactcttctaggaaattcctctgtctcatttgtcctcatctccttcttgctttgctttgctgtggacctctcctccttctccttgacctctctgcctcagtctttgttaatgttgaatcaggatttgagagctggagcccatctttctgcctccatccaaagaggccttttaactcagcctccccttctggaagaagacttggccttttctctgcctgcatgtccctgtgcagaggaaggctgtctctcaagggtaaccccaatctgcctgtgctgctctttcataccctgtctcagtaactatttggccatgtgctccctgggtacacaagttttcagatctactgatagacctgcaggaactctctcatgttagagcaatactggctcaggcaaaacacctggtgggaagttgtatcttgtatagccactgcatattacatagccaggagtaccccttgaggctaattctaccaaccaagggatttgtgctcttcatctgtgggtacttgtccttgtttaggcctcacctccctgctcctgtgtcttaccaataaacttataaagcccaaaaaaaaaaaaaaaaaaaaaaaaaaaaaaaaaaaaaaaa

SEQ ID NO: 384 - DNA, 2427 bp, Homo sapiens
agcctgtgactttcctccctggacaaaggcatcatgagttgtcagatctcttgcaaatctcgaggaagaggaggaggtggaggaggattccggggcttcagcagcggctcagctgtggtgtctggtggaagccggagatcaacttccagcttctcctgcttgagccgccatggtggtggtggcgggggcttcggtggaggcggctttggcagtcggagtcttgttggccttggagggaccaagagcatctccattagtgtggctggaggaggtggtggctttggcgccgctggtggatttggtggcagaggaggtggttttggaggcggcagcggctttggaggcggcagcggctttggaggtggcagcggcttcagtggtggtggtttcggtggaggcggctttggtggaggccgctttggaggttttgggggccctggtggtgttggaggtttagggggtcctggtggctttgggcctggaggataccctggtggcatccacgaagtctctgtcaaccagagcctcctgcagcctctcaacgtgaaagttgacccagagatccagaatgtgaaggcccaagagcgtgagcagatcaaaactctcaacaacaaatttgcctccttcattgacaaggtgcggttcttggagcagcagaaccaggtgttacagaccaaatgggagctgctacaacaaatgaatgttggcacccgccccatcaacctggagcccatcttccaggggtatatcgacagcctcaagagatatctggatgggctcactgcagaaagaacatcacagaattcagagctgaataacatgcaggatcttgtggaggattataagaagaagtatgaggatgaaatcaataagcgcacagctgctgagaatgattttgtgacgcttaaaaaggacgtggacaatgcctacatgataaaggtggagttgcagtccaaggtggacctgctgaaccaggaaattgagtttctgaaagttctctatgatgcggagatatcccagatacatcagagtgtcactgacaccaacgtcatcctctccatggacaacagccgcaacctggacttggatagcatcatcgccgaggtcaaggcccagtatgaggagatcgcccagaggagcaaggaagaagcggaggccctgtaccacagcaagtatgaggagctccaggtgactgtcgggagacatggagacagcctgaaagagatcaagatagagatcagcgagctgaaccgcgtgatccagaggctgcagggggagatcgcacatgtgaagaagcagtgtaagaatgtgcaagatgccatcgcagatgccgagcagcgtggggagcatgccctcaaggatgccaggaacaagttgaatgacctggaggaggccctgcagcaggccaaggaggacttggcgcggctgctgcgtgactaccaggagctgatgaacgtgaagctggccctagatgtggagatcgccacctaccgcaaactgctggagggcgaggagtgcaggatgtctggagacctcagcagcaatgtgactgtgtctgtgacaagcagcaccatttcatcaaatgtggcatccaaggctgcctttggaggttctggaggtagagggtccagttccggaggaggatacagctctggaagcagcagttatggctctggaggccgacagtctggctccagaggcggtagtggaggaggaggttctatctctggaggaggatatggctctggcggtggttctggaggaagatacggatctggtggtggctctaagggagggtccatctctggaggaggatatggctctggaggtggaaaacacagctctggaggtggctctagaggaggctccagctctggaggaggatatggctctggaggtgggggttctagctctgtaaagggtagctcaggtgaagcttttggttccagcgtgaccttctcttttagataaagatgagcccccaccaccaccgactctcccaacccagactctcccactccagaatgtagaagcctgtctctgtacctctaactggcagcaagttaaatttttgtcatttatctctgatggcactttgagggaaaagaatgtccacatacagtttttgaaagatcttctctccaaaccagttagttagagccagtgacgcctctgtgttctggggcggaatctgtgctgtctaggtttgtgcttctagccatgcccattcccgcccccaccatgcctctttgcattgcccattttccagatgtgtattctgttgaggacccaggcccatccagggatttcatctctaagcctggcagtgctggggggaaatgtgtttctgtgtatatagctcctcttgtccactctgctttcggaagtgctgtggtctgggggtcttcataataaacctcatttgca

SEQ ID NO: 385 - DNA, 2507 bp, Homo sapiens
agctccttcccttactctaccttgctcctacttttctctaagtcaacatgagtcgacagtttagttccaggtctgggtaccgaagtggagggggcttcagctctggctctgctgggatcatcaactaccagcgcaggaccaccagcagctccacacgccgcagtggaggaggtggtgggagattttcaagctgtggtggtggtggtggtagctttggtgctggtggtggatttggaagtcggagtcttgttaaccttggtggcagtaaaagcatctccataagtgtggctagaggaggtggacgtggtagtggctttggtggtggttatggtggtggtggctttggtggtggtggctttggtggtggtggctttggtggaggtggcattgggggtggtggctttggtggttttggcagtggtggtggtggttttggtggaggtggctttgggggtggtggatatgggggtggttatggtcctgtctgccctcctggtggcatacaagaagtcactatcaaccagagccttcttcagcccctcaatgtggagattgaccctgagatccaaaaggtgaagtctcgagaaagggagcaaatcaagtcactcaacaaccaatttgcctccttcattgacaaggtgaggttcctggagcagcagaaccaggtactgcaaacaaaatgggagctgctgcagcaggtagatacctccactagaacccataatttagagccctactttgagtcattcatcaacaatctccgaaggagagtggaccaactgaagagtgatcaatctcggttggattcggaactgaagaacatgcaggacatggtggaggattaccggaacaagtatgaggatgaaatcaacaagcggacaaatgcagagaatgaatttgtgaccatcaagaaggatgtggatggtgcttatatgaccaaggtggaccttcaggccaaacttgacaacttgcagcaggaaattgatttccttacagcactctaccaagcagagttgtctcagatgcagactcaaatcagtgaaactaatgtcatcctctctatggacaacaaccgcagtctcgacctggacagcatcattgctgaggtcaaggcccagtacgaggatatagcccagaagagcaaagctgaggccgagtccttgtaccagagcaagtatgaagagctgcagatcactgctggcagacatggggatagtgtgagaaattcaaagatagaaatttctgagctgaatcgtgtgatccagagacttagatctgaaatcgacaatgtcaagaagcagatctccaacttgcagcagtccatcagtgatgcagagcagcgtggcgagaatgccctcaaggatgccaagaacaagctgaatgacctggaggatgccctgcagcaggccaaggaagacctggcccgcctgctgcgcgactaccaggagctgatgaacaccaagctggccctggatctggagattgccacctacaggaccctcctggagggagaagaaagcaggatgtctggagaatgtgccccgaacgtgagtgtgtctgtgagcacaagccacaccaccatcagtggaggtggcagccgaggaggtggcggcggtggctacggctctggaggtagcagctatggctccggaggtggtagctatggttctggaggtggcggcggcggcggccgtggcagctatggctccggaggtagcagctacggctccggaggtggcagctatggctctggaggtggcggcggcggccatggcagctacggctccggaagcagcagtgggggctacagaggtggctctggaggcggcggcggcggcagctctggcggccggggctctggcggcgggagctctggaggctccataggaggccggggatccagctctgggggtgtcaagtcctctggtggcagttccagcgtgaggtttgtttctaccacttattccggagtaaccagataaagagatgccctctgtttcattagctctagttctcccccagcatcactaacaaatatgcttggcaagaccgaggtcgatttgtcccagccttaccggagaaaagagctatggttagttacactagctcatcctattcccccagctctttcttttctgctgtttcccaatgaagttttcagatcagtggcaatctcagtcccctggctatgaccctgctttgttctttccctgagaaacagttcagcagtgaccaccacccacatgacatttcaaagcacctccttaagccagccagagtaggaccagttagacccagggtgtggacagctccttagcatcttatctctgtgctgttttggttttgtacataaggtgtaagcaagttgtttttcttttgtggagaggtcttaaactccccatttccttgttttgctgcaataaactgcatttgaaattctccatgtctcgatcgcccttgtttacggctctgtctaacctggatgggtgttttgtgaggtaaaagaa

SEQ ID NO: 386 - DNA, 2224 bp, Homo sapiens
atgagcagacaagccagcaagacatctggtggcgggagccagggtttctccgggcgctctgctgtggtctccggcagcagcaggatgagctgtgtggcccactctgggggagctggcggaggggcctatggcttccggagcggagcaggtggctttggcagtcgcagcctctacaacctgggcggcaacaagagcatctccatcagcgtggcagctggcggctcccgggctggaggctttgggggagggcggagcagctgtgcctttgcaggtggctatggaggtggctttgggagcggctatggaggtggctttggtggtggctttggtggtggcagaggaatgggaggtggctttggtggagctggtggctttggaggggctggtggctttggaggggctggtggctttggtggtcctggtggctttggtgggtctggtggctttggtgggcctggcagcttgggcagtcctggtggctttgcgcctgggggctttcctgggggaattcaggaagtgactactaaccagagtctcctgcagcccctcaaagtggagactgacccccagattgggcaagtaaaggcccaggagcgggaacagatcaagaccctcaacaacaagtttgcctccttcattgacaaggtgcggttcctggagcaacagaacaaagtcctggagaccaagtggaacctgctccagcagcagggcacaagttccatctcaggcacaaacaaccttgagcctctttttgagaatcacatcaactacctgcggagctacctggacaacatcctcggggagagagggcgcctggactctgagctgaagaacatggaggacctggtggaagacttcaagaagaaatatgaggatgaaatcaataaacgtacagctgctgagaatgaatttgtgactctgaagaaggatgtggacagtgcctatatgaacaaggtggagcttcaggccaaagtggatgccttgatagatgagatcgacttcttaaggaccctctacgacgctgagctatctcagatgcagagccacatcagtgacacatctgtggtgctgtccatggacaataatcgttccctggacctggacagcatcattgctgaagttggtgcacagtatgaggatatcgctcagagaagcaaggccgaagctgaggccctgtaccagaccaagttgggggagctgcagaccacggctggcaggcatggggatgacctaagaaataccaagagcgagatcatagagctcaacagaatgatccagaggctgcgggcagagatcgagggtgtcaagaagcagaatgccaacctgcagacggccattgcgcaggccgagcagcatggagagatggccctcaaggatgccaatgccaagctccaagagctgcaggctgctctacagcaggcgaaggatgacctggcgcggctgctacgtgactaccaggagctgatgaatgtcaagctggccctggacgtggagatcgccacctaccgcaagctgctggagggcgaggagtacagcaggatgtctggagagtgtccgagtgctgtcagcatctccgtggtcagcagcagcacgacttccgcctccgcaggtggctatggaggaggttacggcggaggcatgggcggtggtttaggaggtggcttcagtgcgggcggcggctcaggcattggctttggccggggaggcggcggtggaatcggcggtggatttggcggcggcacgagcggtttcagcggtggcagcggctttggctccatctctggcgcccgctatggagtgagtggcgggggcttcagctcggccagcaaccggggcggcagcatcaagttctcccagtcctcccagtcctcccagcgctactccagataaagagcacgcatcagcatcgcagccactccagcgcctcccctccgctccccacgcccccatattggcaacacccccagcgccaccccatgctccccaagaacgcggctctgcgctggaaggctgtggcctcttgctcctccttccagatccccggccaagcccagtcacgagaatttcaggctcttctctccggctccagcctgtgattgtccaggtgtggcctaggcgccaccttctgctgccccggagtcccctccctgggtgggatgctcactacagctctgatgtatatagcacacagccccctccgcccctccggtctgtcgccaataaa

SEQ ID NO: 387 - DNA, 2617 bp, Homo sapiens
gacttgctccggtttgcagagctaggaggtggcaggctgtgcgctcaaactcaggctgtctaactccacattctgtggggtgagaggatgggtgatggggtgtcttttctggaggagggaggtgctgtgagcctagcgagatggaggtacagtgggtgtgggcctggagcgctgggcccaggcaggggcttctgattaggaagccctggggcaccagttcaggttctcccagagagtagtgtgatgggatccagtaacctgtgccctccagatgacttctgtaggtgtgtttagtgacatgctcaacgggtgcgggaaggatgggcttgtgccaagggccaagcccagagatgtttcagatttttccctttatgcccctgcaaccaagccctgctgctccaggacatataagagacgaaggctgagggctccagcactcaccggcctgggccctgtcacttctctgatagctcccagctcgctctctgcagccatgattgccagacagcagtgtgtccgaggcgggccccggggcttcagctgtggctcggccattgtaggcggtggcaagagaggtgccttcagctcagtctccatgtctggaggtgctggccgatgctcttctgggggatttggcagcagaagcctctacaacctcagggggaacaaaagcatctccatgagtgtggctgggtcacgacaaggtgcctgctttgggggtgctggaggctttggcactggtggctttggtgccggcggcttcggagctggtttcggcactggtggctttggtggtggatttgggggctccttcagtggtaagggtggccctggcttccccgtctgccccgctgggggaattcaggaggtcaccatcaaccagagcttgctcacccccctccacgtggagattgaccctgagatccagaaagtccggacggaagagcgcgaacagatcaagctcctcaacaacaagtttgcctccttcatcgacaaggtgcagttcttagagcaacagaataaggtcctggagaccaaatggaacctgctccagcagcagacgaccaccacctccagcaaaaaccttgagcccctctttgagacctacctcagtgtcctgaggaagcagctagataccttgggcaatgacaaagggcgcctgcagtctgagctgaagaccatgcaggacagcgtggaggacttcaagactaagtatgaagaggagatcaacaaacgcacagcagccgagaatgactttgtggtcctaaagaaggacgtggatgctgcctacctgaacaaggtggagttggaggccaaggtggacagtcttaatgacgagatcaacttcctgaaggtcctctatgatgcggagctgtcccagatgcagacccatgtcagcgacacgtccgtggtcctttccatggacaacaaccgcaacctggacctggacagcattattgccgaggtccgtgcccagtacgaggagattgcccagaggagcaaggctgaggctgaagccctgtaccagaccaaggtccagcagctccagatctcggttgaccaacatggtgacaacctgaagaacaccaagagtgaaattgcagagctcaacaggatgatccagaggctgcgggcagagatcgagaacatcaagaagcagtgccagactcttcaggtatccgtggctgatgcagagcagcgaggtgagaatgcccttaaagatgcccacagcaagcgcgtagagctggaggctgccctgcagcaggccaaggaggagctggcacgaatgctgcgtgagtaccaggagctcatgagtgtgaagctggccttggacatcgagatcgccacctaccgcaaactgctggagggcgaggagtacagaatgtctggagaatgccagagtgccgtgagcatctctgtggtcagcggtagcaccagcactggaggcatcagcggaggattaggaagtggctccgggtttggcctgagtagtggctttggctccggctctggaagtggctttgggtttggtggcagtgtctctggcagttccagcagcaagatcatctctaccaccaccctgaacaagagacgatagaggagacgaggtccctgcagctcactgtgtccagctgggcccagcactggtgtctctgtgcttccttcacttcacctccatcctctgtctctggggctcatcttactagtatcccctccactatcccatgggctctctctgccccaggatgatcttctgtgctgggacagggactctgcctcttggagtttggtagctacttcttgatttgggcctggtgacccacctggaatgggaaggatgtcagctgacctctcacctcccatgggcagagaagaaaatgaccaggagtgtcatctccagaattattggggtcacatatgtcccttcccagtccaatgccatctcccactagatcctgtattatccatctacatcagaaccaaactacttctccaacacccggcagcacttggccctgcaagcttaggatgagaaccacttagtgtcccattctactcctctcattccctcttatccatctgcaggtgaatcttcaataaaatgcttttgtcattc

SEQ ID NO: 388 - DNA, 1752 bp, Homo sapiens
ctgctccttctaggatctccgcctggttcggcccgcctgcctccactcctgcctccaccatgtccatcagggtgacccagaagtcctacaaggtgtccacctctggcccccgggccttcagcagccgctcctacacgagtgggcccggttcccgcatcagctcctcgagcttctcccgagtgggcagcagcaactttcgcggtggcctgggcggcggctatggtggggccagcggcatgggaggcatcaccgcagttacggtcaaccagagcctgctgagcccccttgtcctggaggtggaccccaacatccaggccgtgcgcacccaggagaaggagcagatcaagaccctcaacaacaagtttgcctccttcatagacaaggtacggttcctggagcagcagaacaagatgctggagaccaagtggagcctcctgcagcagcagaagacggctcgaagcaacatggacaacatgttcgagagctacatcaacaaccttaggcggcagctggagactctgggccaggagaagctgaagctggaggcggagcttggcaacatgcaggggctggtggaggacttcaagaacaagtatgaggatgagatcaataagcgtacagagatggagaacgaatttgtcctcatcaagaaggatgtggatgaagcttacatgaacaaggtagagctggagtctcgcctggaagggctgaccgacgagatcaacttcctcaggcagctatatgaagaggagatccgggagctgcagtcccagatctcggacacatctgtggtgctgtccatggacaacagccgctccctggacatggacagcatcattgctgaggtcaaggcacagtacgaggatattgccaaccgcagccgggctgaggctgagagcatgtaccagatcaagtatgaggagctgcagagcctggctgggaagcacggggatgacctgcggcgcacaaagactgagatctctgagatgaaccggaacatcagccggctccaggctgagattgagggcctcaaaggccagagggcttccctggaggccgccattgcagatgccgagcagcgtggagagctggccattaaggatgccaacgccaagttgtccgagctggaggccgccctgcagcgggccaagcaggacatggcgcggcagctgcgtgagtaccaggagctgatgaacgtcaagctggccctggacatcgagatcgccacctacaggaagctgctggagggcgaggagagccggctggagtctgggatgcagaacatgagtattcatacgaagaccaccagcggctatgcaggtggtctgagctcggcctatgggggcctcacaagccccggcctcagctacagcctgggctccagctttggctctggcgcgggctccagctccttcagccgcaccagctcctccagggccgtggttgtgaagaagatcgagacacgtgatgggaagctggtgtctgagtcctctgacgtcctgcccaagtgaacagctgcggcagcccctcccagcctacccctcctgcgctgccccagagcctgggaaggaggccgctatgcagggtagcactgggaacaggagacccacctgaggctcagccctagccctcagcccacctggggagtttactacctggggaccccccttgcccatgcctccagctacaaaacaattcaattgctttttttttttggtccaaaataaaacctcagctagctctgccaaaccc

SEQ ID NO: 389 - DNA, 1412 bp, Homo sapiens
cggggtcgtccgcaaagcctgagtcctgtcctttctctctccccggacagcatgagcttcaccactcgctccaccttctccaccaactaccggtccctgggctctgtccaggcgcccagctacggcgcccggccggtcagcagcgcggccagcgtctatgcaggcgctgggggctctggttcccggatctccgtgtcccgctccaccagcttcaggggcggcatggggtccgggggcctggccaccgggatagccgggggtctggcaggaatgggaggcatccagaacgagaaggagaccatgcaaagcctgaacgaccgcctggcctcttacctggacagagtgaggagcctggagaccgagaaccggaggctggagagcaaaatccgggagcacttggagaagaagggaccccaggtcagagactggagccattacttcaagatcatcgaggacctgagggctcagatcttcgcaaatactgtggacaatgcccgcatcgttctgcagattgacaatgcccgtcttgctgctgatgactttagagtcaagtatgagacagagctggccatgcgccagtctgtggagaacgacatccatgggctccgcaaggtcattgatgacaccaatatcacacgactgcagctggagacagagatcgaggctctcaaggaggagctgctcttcatgaagaagaaccacgaagaggaagtaaaaggcctacaagcccagattgccagctctgggttgaccgtggaggtagatgcccccaaatctcaggacctcgccaagatcatggcagacatccgggcccaatatgacgagctggctcggaagaaccgagaggagctagacaagtactggtctcagcagattgaggagagcaccacagtggtcaccacacagtctgctgaggttggagctgctgagacgacgctcacagagctgagacgtacagtccagtccttggagatcgacctggactccatgagaaatctgaaggccagcttggagaacagcctgagggaggtggaggcccgctacgccctacagatggagcagctcaacgggatcctgctgcaccttgagtcagagctggcacagacccgggcagagggacagcgccaggcccaggagtatgaggccctgctgaacatcaaggtcaagctggaggctgagatcgccacctaccgccgcctgctggaagatggcgaggactttaatcttggtgatgccttggacagcagcaactccatgcaaaccatccaaaagaccaccacccgccggatagtggatggcaaagtggtgtctgagaccaatgacaccaaagttctgaggcattaagccagcagaagcagggtaccctttggggagcaggaggccaataaaaagttcagagttcattggatgtc

SEQ ID NO: 390 - DNA, 2516 bp, Homo sapiens
cggggccggcggacccgcgggcaggcactgcccgggctggacgacgtctggccggctcccggcgaagggcagcggaggagcggcccagagcgcgcagctagggcactggcgaaaccccgggacagtccctctccgtgcgggggcggcgcagagcagtcccatccccggggtcccgggcgcggctgactgccggctggttccctgcgcgcagtagctccccgagccgggctgcaccggaggcggcgagatggtcgcgcgcgtcggcctcctgctgcgcgccctgcagctgctactgtggggccacctggacgcccagcccgcggagcgcggaggccaggagctgcgcaaggaggcggaggcattcctagagaagtacggatacctcaatgaacaggtccccaaagctcccacctccactcgattcagcgatgccatcagagcgtttcagtgggtgtcccagctacctgtcagcggcgtgttggaccgcgccaccctgcgccagatgactcgtccccgctgcggggttacagataccaacagttatgcggcctgggctgagaggatcagtgacttgtttgctagacaccggaccaaaatgaggcgtaagaaacgctttgcaaagcaaggtaacaaatggtacaagcagcacctctcctaccgcctggtgaactggcctgagcatctgccggagccggcagttcggggcgccgtgcgcgccgccttccagttgtggagcaacgtctcagcgctggagttctgggaggccccagccacaggccccgctgacatccggctcaccttcttccaaggggaccacaacgatgggctgggcaatgcctttgatggcccagggggcgccctggcgcacgccttcctgccccgccgcggcgaagcgcacttcgaccaagatgagcgctggtccctgagccgccgccgcgggcgcaacctgttcgtggtgctggcgcacgagatcggtcacacgcttggcctcacccactcgcccgcgccgcgcgcgctcatggcgccctactacaagaggctgggccgcgacgcgctgctcagctgggacgacgtgctggccgtgcagagcctgtatgggaagcccctagggggctcagtggccgtccagctcccaggaaagctgttcactgactttgagacctgggactcctacagcccccaaggaaggcgccctgaaacgcagggccctaaatactgccactcttccttcgatgccatcactgtagacaggcaacagcaactgtacatttttaaagggagccatttctgggaggtggcagctgatggcaacgtctcagagccccgtccactgcaggaaagatgggtcgggctgccccccaacattgaggctgcggcagtgtcattgaatgatggagatttctacttcttcaaagtgcaatccgtttgattgatatgaataccaaccatcgtgggctccagcttaaaggagagcagagggggtcgatgctggaggttccggggccccaagccagtgtggggtctcccacagctgtgccgggcagggggcctgccccgccatcctgacgccgccctcttcttccctcctctgcgccgcctcatcctcttcaagggtgcccgctactacgtgctggcccgagggggactgcaagtggagccctactacccccgaagtctgcaggactggggaggcatccctgaggaggtcagcggcgccctgccgaggcccgatggctccatcatcttcttccgagatgaccgctactggcgcctcgaccaggccaaactgcaggcaaccacctcgggccgctgggccaccgagctgccctggatgggctgctggcatgccaactcggggagcgccctgttctgaaggcacctcctcacctcagaaactggtggtgctctcagggcaaaatcatgttccccacccccggggcagaacccctcttagaagcctctgagtccctctgcagaagaccgggcagcaaagcctccatctggaagtctgtctgcctttgttccttgaagaatgcagcattgtctttgtctgtccccaccacatggaggtgggggtgggatcaatcttaggaaaagcaaaaaagggtcccagatcccttggccctttcctccgaggacttctatcctccccaggcctttgtttcttcggctaaaggtacagttcctttcaagaggtaacagcactgggatccaagcagggggatgaaaaactcagcagagaaattcgagaccattttgcaagactgtgcccttctcctcaggaccccctggctcagttcttgaaaaacggtgtcatatttagtcagaggccccacccccaggaagcatggatggggatgaaggcacaggcgtctccaacctcagaggccctttgtggggtcaggacacagagtgggagggagactgatgcaggcctaccagtccctggctttttgtctggggctggaataaagaggtgccttcagctggtgggccgagaggcaggaagcagcctt

SEQ ID NO: 391 - DNA, 3291 bp, Homo sapiens
aagtcgcgaccagagccattggagggcgcggggactgcaaccctaatcagagcccaaatggcgcagtgggaaatgctgcagaatcttgacagcccctttcaggatcagctgcaccagctttactcgcacagcctcctgcctgtggacattcgacagtacttggctgtctggattgaagaccagaactggcaggaagctgcacttgggagtgatgattccaaggctaccatgctattcttccacttcttggatcagctgaactatgagtgtggccgttgcagccaggacccagagtccttgttgctgcagcacaatttgcggaaattctgccgggacattcagcccttttcccaggatcctacccagttggctgagatgatctttaacctccttctggaagaaaaaagaattttgatccaggctcagagggcccaattggaacaaggagagccagttctcgaaacacctgtggagagccagcaacatgagattgaatcccggatcctggatttaagggctatgatggagaagctggtaaaatccatcagccaactgaaagaccagcaggatgtcttctgcttccgatataagatccaggccaaagggaagacaccctctctggacccccatcagaccaaagagcagaagattctgcaggaaactctcaatgaactggacaaaaggagaaaggaggtgctggatgcctccaaagcactgctaggccgattaactaccctaatcgagctactgctgccaaagttggaggagtggaaggcccagcagcaaaaagcctgcatcagagctcccattgaccacgggttggaacagctggagacatggttcacagctggagcaaagctgttgtttcacctgaggcagctgctgaaggagctgaagggactgagttgcctggttagctatcaggatgaccctctgaccaaaggggtggacctacgcaacgcccaggtcacagagttgctacagcgtctgctccacagagcctttgtggtagaaacccagccctgcatgccccaaactccccatcgacccctcatcctcaagactggcagcaagttcaccgtccgaacaaggctgctggtgagactccaggaaggcaatgagtcactgactgtggaagtctccattgacaggaatcctcctcaattacaaggcttccggaagttcaacattctgacttcaaaccagaaaactttgacccccgagaaggggcagagtcagggtttgatttgggactttggttacctgactctggtggagcaacgttcaggtggttcaggaaagggcagcaataaggggccactaggtgtgacagaggaactgcacatcatcagcttcacggtcaaatatacctaccagggtctgaagcaggagctgaaaacggacaccctccctgtggtgattatttccaacatgaaccagctctcaattgcctgggcttcagttctctggttcaatttgctcagcccaaaccttcagaaccagcagttcttctccaacccccccaaggccccctggagcttgctgggccctgctctcagttggcagttctcctcctatgttggccgaggcctcaactcagaccagctgagcatgctgagaaacaagctgttcgggcagaactgtaggactgaggatccattattgtcctgggctgacttcactaagcgagagagccctcctggcaagttaccattctggacatggctggacaaaattctggagttggtacatgaccacctgaaggatctctggaatgatggacgcatcatgggctttgtgagtcggagccaggagcgccggctgctgaagaagaccatgtctggcacctttctactgcgcttcagtgaatcgtcagaagggggcattacctgctcctgggtggagcaccaggatgatgacaaggtgctcatctactctgtgcaaccgtacacgaaggaggtgctgcagtcactcccgctgactgaaatcatccgccattaccagttgctcactgaggagaatatacctgaaaacccactgcgcttcctctatccccgaatcccccgggatgaagcttttgggtgctactaccaggagaaagttaatctccaggaacggaggaaatacctgaaacacaggctcattgtggtctctaatagacaggtggatgaactgcaacaaccgctggagcttaagccagagccagagctggagtcattagagctggaactagggctggtgccagagccagagctcagcctggacttagagccactgctgaaggcagggctggatctggggccagagctagagtctgtgctggagtccactctggagcctgtgatagagcccacactatgcatggtatcacaaacagtgccagagccagaccaaggacctgtatcacagccagtgccagagccagatttgccctgtgatctgagacatttgaacactgagccaatggaaatcttcagaaactgtgtaaagattgaagaaatcatgccgaatggtgacccactgttggctggccagaacaccgtggatgaggtttacgtctcccgccccagccacttctacactgatggacccttgatgccttctgacttctaggaaccacatttcctctgttcttttcatatctctttgcccttcctactcctcatagcatgatattgttctccaaggatgggaatcaggcatgtgtcccttccaagctgtgttaactgttcaaactcaggcctgtgtgactccattggggtgagaggtgaaagcataacatgggtacagaggggacaacaatgaatcagaacagatgctgagccataggtctaaataggatcctggaggctgcctgctgtgctgggaggtataggggtcctgggggcaggccagggcagttgacaggtacttggagggctcagggcagtggcttctttccagtatggaaggatttcaacattttaatagttggttaggctaaactggtgcatactggcattggccttggtggggagcacagacacaggataggactccatttctttcttccattccttcatgtctaggataacttgctttcttctttcctttactcctggctcaagccctgaatttcttcttttcctgcaggggttgagagctttctgccttagcctaccatgtgaaactctaccctgaagaaagggatggataggaagtagacctctttttcttaccagtctcctcccctactctgccccctaagctggctgtacctgttcctcccccataaaatgatcctgccaatct

SEQ ID NO: 392 - DNA, 1283 bp, Homo sapiens
ctctctgctcctcctgttcgacagtcagccgcatcttcttttgcgtcgccagccgagccacatcgctcagacaccatggggaaggtgaaggtcggagtcaacggatttggtcgtattgggcgcctggtcaccagggctgcttttaactctggtaaagtggatattgttgccatcaatgaccccttcattgacctcaactacatggtttacatgttccaatatgattccacccatggcaaattccatggcaccgtcaaggctgagaacgggaagcttgtcatcaatggaaatcccatcaccatcttccaggagcgagatccctccaaaatcaagtggggcgatgctggcgctgagtacgtcgtggagtccactggcgtcttcaccaccatggagaaggctggggctcatttgcaggggggagccaaaagggtcatcatctctgccccctctgctgatgcccccatgttcgtcatgggtgtgaaccatgagaagtatgacaacagcctcaagatcatcagcaatgcctcctgcaccaccaactgcttagcacccctggccaaggtcatccatgacaactttggtatcgtggaaggactcatgaccacagtccatgccatcactgccacccagaagactgtggatggcccctccgggaaactgtggcgtgatggccgcggggctctccagaacatcatccctgcctctactggcgctgccaaggctgtgggcaaggtcatccctgagctgaacgggaagctcactggcatggccttccgtgtccccactgccaacgtgtcagtggtggacctgacctgccgtctagaaaaacctgccaaatatgatgacatcaagaaggtggtgaagcaggcgtcggagggccccctcaagggcatcctgggctacactgagcaccaggtggtctcctctgacttcaacagcgacacccactcctccacctttgacgctggggctggcattgccctcaacgaccactttgtcaagctcatttcctggtatgacaacgaatttggctacagcaacagggtggtggacctcatggcccacatggcctccaaggagtaagacccctggaccaccagccccagcaagagcacaagaggaagagagagaccctcactgctggggagtccctgccacactcagtcccccaccacactgaatctcccctcctcacagttgccatgtagaccccttgaagaggggaggggcctagggagccgcaccttgtcatgtaccatcaataaagtaccctgtgctcaacc

SEQ ID NO: 393 - protein, 331 aa, Homo sapiens
MGGSAGRELDAGRKPKLTRTQSAFSPVSFSPLFTGETVSLVDVDISQRGLTSPHPPTPPPPPRRSLSLLDDISGTLPTSVLVAPMGSSLQSFPLPPPPPPHAPDAFPRIAPIRAAESLHSQPPQHLQCPLYRPDSSSFAASLRELEKCGWYWGPMNWEDAEMKLKGKPDGSFLVRDSSDPRYILSLSFRSQGITHHTRMEHYRGTFSLWCHPKFEDRCQSVVEFIKRAIMHSKNGKFLYFLRSRVPGLPPTPVQLLYPVSRFSNVKSLQHLCRFRIRQLVRIDHIPDLPLPKPLISYIRKFYYYDPQEEVYLSLKEAQLISKQKQEVEPST

SEQ ID NO: 394 - protein, 306 aa, Homo sapiens
MAAPIPQGFSCLSRVLGWWSRQPVLVTQSAAIVPVRTKKRFTPPIYQPKFKTEKEFMQHARKAGLVIPPEKSDRSIHLACTAGIFDAYVPPEGDARISSLSKEGLIERTERMKKTMASQVSIRRIKDYDANFKIKDFPEKAKDIFIEAHLCLNNSDHDRLHTLVTEHCFPDMTWDIKYKTVRWSFVESLEPSHVVQVRCSSMMNQGNVYGQITVRMHTRQTLAIYDRFGRLMYGQEDVPKDVLEYVVFEKQLTNPYGSWRMHTKIVPPWAPPKQPILKTVMIPGPQLKPEEEYEEAQGEAQKPQLA

SEQ ID NO: 395 - protein, 557 aa, Homo sapiens
MVSKLTSLQQELLSALLSSGVTKEVLVQALEELLPSPNFGVKLETLPLSPGSGAEPDTKPVFHTLTNGHAKGRLSGDEGSEDGDDYDTPPILKELQALNTEEAAEQRAEVDRMLSEDPWRAAKMIKGYMQQHNIPQREVVDVTGLNQSHLSQHLNKGTPMKTQKRAALYTWYVRKQREILRQFNQTVQSSGNMTDKSSQDQLLFLFPEFSQQSHGPGQSDDACSEPTNKKMRRNRFKWGPASQQILYQAYDRQKNPSKEEREALVEECNRAECLQRGVSPSKAHGLGSNLVTEVRVYNWFANRRKEEAFRQKLAMDAYSSNQTHSLNPLLSHGSPHHQPSSSPPNKLSGVRYSQQGNNEITSSSTISHHGNSAMVTSQSVLQQVSPASLDPGHNLLSPDGKMISVSGGGLPPVSTLTNIHSLSHHNPQQSQNLIMTPLSGVMAIAQSLNTSQAQSVPVINSVAGSLAALQPVQFSQQLHSPHQQPLMQQSPGSHMAQQPFMAAVTQLQNSHMYAHKQEPPQYSHTSRFPSAMVVTDTSSISTLTNMSSSKQCPLQAW

SEQ ID NO: 396 - protein, 491 aa, Homo sapiens
MSSVEAKIEDKKVQRESKLTSGKLENLRKEKINFLRNKHKIHVQGTDLPDPIATFQQLDQEYKINSRLLQNILDAGFQMPTPIQMQAIPVMLHGRELLASAPTGSGKTLAFSIPILMQLKQPANKGFRALIISPTRELASQIHRELIKISEGTGFRIHMIHKAAVAAKKFGPKSSKKFDILVTTPNRLIYLLKQDPPGIDLASVEWLVVDESDKLFEDGKTGFRDQLASIFLACTSHKVRRAMFSATFAYDVEQWCKLNLDNVISVSIGARNSAVETVEQELLFVGSETGKLLAVRELVKKGFNPPVLVFVQSIERAKELFHELIYEGINVDVIHAERTQQQRDNTVHSFRAGKIWVLICTALLARGIDFKGVNLVINYDFPTSSVEYIHRIGRTGRAGNKGKAITFFTEDDKPLLRSVANVIQQAGCPVPEYIKGFQKLLSKQKKKMIKKPLERESISTTPKCFLEKAKDKQRKVTGQNSKKKVALEDKS

SEQ ID NO: 397 - protein, 424 aa, Homo sapiens
MDFSRRSFHRSLSSSLQAPVVSTVGMQRLGTTPSVYGGAGGRGIRISNSRHTVNYGSDLTGGGDLFVGNEKMAMQNLNDRLASYLEKVRTLEQSNSKLEVQIKQWYETNAPRAGRDYSAYYRQIEELRSQIKDAQLQNARCVLQIDNAKLAAEDFRLKYETERGIRLTVEADLQGLNKVFDDLTLHKTDLEIQIEELNKDLALLKKEHQEEVDGLHKHLGNTVNVEVDAAPGLNLGVIMNEMRQKYEVMAQKNLQEAKEQFERQTAVLQQQVTVNTEELKGTEVQLTELRRTSQSLEIELQSHLSMKESLEHTLEETKARYSSQLANLQSLLSSLEAQLMQIRSNMERQNNEYHILLDIKTRLEQEIATYRRLLEGEDVKTTEYQLSTLEERDIKKTRKIKTVVQEVVDGKVVSSEVKEVEENI

SEQ ID NO: 398 - protein, 209 aa, Homo sapiens
MEKHHVPSDFNVNVKVDTGPREDLIKVLEDMRQEYELIIKKKHRDLDTWYKEQSAAMSQEAASPATVQSRQGDIHELKRTFQALEIDLQTQYSTKSALENMLSETQSRYSCKLQDMQEIISHYEEELTQLRHELERQNNEYQVLLGIKTHLEKEITTYRRLLEGESEGTREESKSSMKVSATPKIKAITQETINGRLVLCQVNEIQKHA

SEQ ID NO: 399 - protein, 98 aa, Homo sapiens
MDCCASRGCSVPTGPATTICSSDKSCRCGVCLPSTCPHTVWLLEPTCCDNCPPPCHIPQPCVPTCFLLNSCQPTPGLETLNLTTFTQPCCEPCLPRGC

SEQ ID NO: 400 - protein, 98 aa, Homo sapiens
MDCCASRSCSVPTGPATTICSSDKSCRCGVCLPSTCPHTVWLLEPICCDNCPPPCHIPQPCVPTCFLLNSCQPTPGLETLNLTTFTQPCCEPCLPRGC

SEQ ID NO: 401 - protein, 79 aa, Homo sapiens
MSCCDSYLQGCCSVPTGLATTICPSDISCQCEVCLPSTCPHEISLLQPTCCEPGPCLAACLTPMCHPVDCSTNATQLQP

SEQ ID NO: 402 - protein, 98 aa, Homo sapiens
MYCCALRSCSVPTGPATTFCSFDKSCRCGVCLPSTCPHEISLLQPICCDTCPPPCCKPDTYVPTCWLLNNCHPTPGLSGINLTTYVQPGCESPCEPRC

SEQ ID NO: 403 - protein, 174 aa, Homo sapiens
MTCCQTSFCGYPSFSISGTCGSSCCQPSCCETSCCQPRSCQTSFCGFPSFSTSGTCSSSCCQPSCCETSCCQPSCCETSCCQPSCCQISSCGTGCGIGGGISYGQEGSSGAVSTRIRWCRPDSRVEGTYLPPCCVVSCTPPSCCQLHHAQASCCRPSYCGQSCCRPVCCCEPTC

SEQ ID NO: 404 - protein, 167 aa, Homo sapiens
MTCCQTSFCGYPSCSTSGTCGSSCCQPSCCETSCCQPSCCQTSFCGFPSFSTSGTCSSSCCQPSCCETSCCQPSCCQTSSCGTGCGIGGGIGYGQEGSSGAVSTRIRWCRPDCRVEGTCLPPCCVVSCTPPTCCQLHHAEASCCRPSYCGQSCCRPVCCCYSCEPTC

SEQ ID NO: 405 - protein, 177 aa, Homo sapiens
MACCQTSFCGFPSCSTSGTCGSSCCQPSCCETSSCQPRCCETSCCQPSCCQTSFCGFPSFSTGGTCDSSCCQPSCCETSCCQPSCYQTSSCGTGCGIGGGIGYGQEGSSGAVSTRIRWCRPDCRVEGTCLPPCCVVSCTPPSCCQLHHAEASCCRPSYCGQSCCRPVCCCYCSEPTC

SEQ ID NO: 406 - protein, 85 aa, Homo sapiens
VTCVPRCTRPICEPCRRPVCCDPCSLQEGCCRPITCCPSSCTAVVCRPCCWATTCCQPVSVQSPCCRPPCGQPTPCSTTCRTSSC

SEQ ID NO: 407 - protein, 128 aa, Homo sapiens
MTGSCCGSTLSSLSYGGGCCQPCCCRDPCCCRPVTCQTTVCRPVTCVPRCTRPICEPCRRPVCCDPCSLQEGCCRPITCCPSSCTAVVCRPCCWATTCCQPVSVQSPCCRPPCGQPTPCSTTCRTSSC

SEQ ID NO: 408 - protein, 20 aa, Homo sapiens
METHCTGRSASFCSSSAILI

SEQ ID NO: 409 - protein, 210 aa, Homo sapiens
MVSSCCGSVCSDQGCGQVLCQETCCRPSCCQTTCCRTTCYRPSCCVSSCCRPQCCQSVCCQPTCCRPSCCETTCCHPRCCISSCCRPSCCMSSCCKPQCCQSVCCQPTCCRPSCCISSCCRPSCCVSRCCRPQCCQSVCCQPTCCRPSCCISSCCRPSCCESSCCRPCCCRPCCCLRPVCGRVSCHTTCYRPTCVISTCPRPLCCASSCC

SEQ ID NO: 410 - protein, 195 aa, Homo sapiens
MVNSCCGSVCSHQGCGQDLCQETCCRPSCCETTCCRTTYCRPSCCVSSCCRPQCCQSVCCQPTCCRPRCCISSCCRPSCCVSSCCKPQCCQSMCCQPTCCRPRCCISSCCRPSCCVSSCCRPQCCQSVCCQPTCCHPSCSISSCCRPSCCESSCCRPCCCLRPVCGGVSCHTTCYRPTCVISSCPRPLCCASSCC

SEQ ID NO: 411 - protein, 201 aa, Homo sapiens
MVNSCCGSVCSDQGCGLENCCRPSCCQTTCCRTTCCRPSCCVSSCCRPQCCQSVCCQPTCCRPSCCQTTCCRTTCCRPSCCVSSCCRPQCCQSVCCQPTCCRPSCCQTTCCRTTCCRPSCCVSSCCRPQCCQSVCCQPTCCRPSCCISSSCCPSCCESSCCRPCCCLRPVCGRVSCHTTCYRPTCVISTCPRPLCCASSCC

SEQ ID NO: 412 - protein, 186 aa, Homo sapiens
MVSSCCGSVSSEQSCGLENCCRPSCCQTTCCRTTCCRPSCCKPQCCQSVCYQPTCCHPSCCISSCCHPYCCESSCCRPCCCRPSCCQTTCCRTTCCRTTCCCPSCCVSSCCRPQCCQSVCCQPTCCRPSCCISSCCHPSCCESSCCRPCCCVRPVCGRVSCHTTCYRPTCVISTCPRPLCCASSCC

SEQ ID NO: 413 - protein, 106 aa, Homo sapiens
MVNSCCGSVCSDQGCGLENCCRPSYCQTTCCRTTCCRPSCCRPSCCRPQCCQSVCCQPTCCCPSYCVSSCCRPQCCQTTRCRTTCCRPSCCVSRCYRPHCGQSLCC

SEQ ID NO: 414 - protein, 166 aa, Homo sapiens
MVNSCCGSVCSDQGCGLENCCRPSYCQTTCCRTTCCRPSCCVSSCCRPQCCQTTCCRTTCCHPSCCVSSCCRPQCCQSVCCQPTCCRPQCCQTTCCRTTCCRPSCCRPQCCQSVCCQPTCCCPSYCVSSCCRPQCCQTTCCRTTCCRPSCCVSRCYRPHCGQSLCC

SEQ ID NO: 415 - protein, 136 aa, Homo sapiens
MVNSCCGSVCSDQGCGLENCCRPSCCQTTCCRTTCCRPSCCVSSCCRPQCCQSVCCQPTCCSPSCCQTTCCRTTCCRPSCCVSSCFRPQCCQSVCCQPTCCRPSCGQTTCCRTTCYRPSCCVSTCCRPTCSSGSCC

SEQ ID NO: 416 - protein, 127 aa, Homo sapiens
MVNSCCGSVCSDQGCDQGLCQETCCRPSCCQTTCCCPSCVVSSCCRPSCSQTTCCQTTCCRPSCCRPVCCQTTCRPSCGVSSCCRPLCCQTTCRPSCGVSSCCRPLCCQTTCCRTTCCRPSCCGSSC

SEQ ID NO: 417 - protein, 174 aa, Homo sapiens
MTHCCSPCCQPTCCRTTCCRTTCWKPTTVTTCSSTPCCQPACCVSSCCQPCCRPTCCQNTCCRTTCCQPTCVTSCCQPSCCSTPCCQPTCCGSSCCGQTSCGSSCGQSSSCAPVYCRRTCYYPTTVCLPGCLNQSCGSNCCQPCCRPACCETTCCRTTCFQPTCVSSCCQPSCC

SEQ ID NO: 418 - protein, 159 aa, Homo sapiens
MTHCCSPCCQPTCCRTTCWQPTTVTTCSSTPCCQPSCCVSSCCQPCCHPTCCQNTCCRTTCCQPICVTSCCQPSCCSTPCCQPTCCGSSCGQSSSCAPVYCRRTCYHPTSVCLPGCLNQSCGSNCCQPCCRPACCETTCCRTTCFQPTCVYSCCQPSCC

SEQ ID NO: 419 - protein, 159 aa, Homo sapiens
MTHCCSPCCQPTCCRTTCWKPTTVTTCSSTPCCQPSCCVSSCCQPCCRPTCCQNTCCQPICVTSCCQPSCCSTPCCQPTCCGQTSCGSSCGQSSSCAPVYCRRTCYHPTTVCLPGCLNQSCGSSCCQPCCRPACCETTCCRTTCFQPTCVYSCCQPSCC

SEQ ID NO: 420 - protein, 154 aa, Homo sapiens
MTHCCSPCCQPTCCRTTCCRTTCWKPTTVTTCSSTPCCQPSCCVSSCCQPCCRPACCQNTCCRTTCCQPTCLSSCCGQTSCGSSCGQSSSCAPVYCRRTCYYPTTVCLPGCLNQSCGSSCCQPCCRPACCETTCCRTTCFQPTCVSSCCQPSCC

SEQ ID NO: 421 - protein, 154 aa, Homo sapiens
MTHCCSPCCQPTCCRTTCCRTTCWKPTTVTTCSSTPCCQPSCCVSSCCQPCCRPTCCQNTCCQPTCVTSCCQPSCCSTPCCQPTCCGSSCDQSSSCAPVYCRRTCYYPTTVCLPGCLNQSCGSNCCQPCCRPACCETTCFQPTCVSSCCQPFCC

SEQ ID NO: 422 - protein, 138 aa, Homo sapiens
MLQDHLLQDNLLEAHHCDHLQQHILLPALLLCVQLLPALLPPNLLSKHLLQDHLLPAHLCDQLLPAFLLQHTLLTAHLLWVQLLWPNHLWVQLLPAQLLCTHLLQENLLPPHECLPAWLPKSELWLQLLPALLPPSLL

SEQ ID NO: 423 - protein, 409 aa, Homo sapiens
MSGSCSSRKCFSVPATSLCSTEVSCGGPICLPSSCQSQTWQLVTCQDSCGSSSCGPQCRQPSCPVSSCAQPLCCDPVICEPSCSVSSGCQPVCCEATTCEPSCSVSNCYQPVCFEATICEPSCSVSNCCQPVCFEATVCEPSCSVSSCAQPVCCEPAICEPSCSVSSCCQPVGSEATSCQPVLCVPTSCQPVLCKSSCCQPVVCEPSCCSAVCTLPSSCQPVVCEPSCCQPVCPTPTCSVTSSCQAVCCDPSPWSSASAICRPTCPRTFYIPSSSKRPCSATISYRPVSRPICRPICSGLLTYRQPYMTSISYRPACYRPCYSILRRPACVTSYSCRPVYFRPSCTESDSCKRDCKKSTSSQLDCVDTTPCKVDVSEEAPCQPTEAKPISPTTREAAAAQPAASKPANC

SEQ ID NO: 424 - protein, 105 aa, Homo sapiens
MGCCPGDCFTCCTQEQNCCEECCCQPGCCGCCGSCCGCGGSGCGGSGCGGSCCGSSCCGSGCGGCGGCGGCGGGCCGSSCCGSSCCGSGCCGPVCCQPTPICDTK

SEQ ID NO: 425 - protein, 404 aa, Homo sapiens
MSYSCGLPSLSCRTSCSSRPCVPPSCHGCTLPGACNIPANVSNCNWFCEGSFNGSEKETMQFLNDRLASYLEKVRQLERDNAELENLIRERSQQQEPLVCASYQSYFKTIEELQQKILCSKSENARLVVQIDNAKLASDDFRTKYETELSLRQLVESDINGLRRILDELTLCRSDLEAQVESLKEELLCLKQNHEQEVNTLRCQLGDRLNVEVDAAPTVDLNQVLNETRSQYEALVETNRREVEQWFATQTEELNKQVVSSSEQLQSYQAEIIELRRTVNALEIELQAQHNLRDSLENTLTESEARYSSQLSQVQRLITNVESQLAEIRSDLERQNQEYQVLLDVRARLECEINTYRSLLESEDCKLPSNPCATTNACDKSTGPCISNPCGLRARCGPCNTFGY

SEQ ID NO: 426 - protein, 404 aa, Homo sapiens
MPYNFCLPSLSCRTSCSSRPCVPPSCHGYTLPGACNIPANVSNCNWFCEGSFNGSEKETMQFLNDRLASYLEKVRQLERDNAELENLIRERSQQQEPLLCPSYQSYFKTIEELQQKILCSKSENARLVVQIDNAKLAADDFRTKYQTEQSLRQLVESDINSLRRILDELTLCRSDLEAQMESLKEELLSLKQNHEQEVNTLRCQLGDRLNVEVDAAPAVDLNQVLNETRNQYEALVETNRREVEQWFATQTEELNKQVVSSSEQLQSYQAEIIELRRTVNALEIELQAQHNLRYSLENTLTESEARYSSQLSQVQSLITNVESQLAEIRSDLERQNQEYQVLLDVRARLECEINTYRSLLESEDCKLPSNPCATTNACEKPIGSCVTNPCGPRSRCGPCNTFGY

SEQ ID NO: 427 - protein, 436 aa, Homo sapiens
MLYAKPPPTINGIKGLQRKERLKPAHIHLQQLTCFSITCSSTMSYSCCLPSLGCRTSCSSRPCVPPSCHGYTLPGACNIPANVSNCNWFCEGSFNGSEKETMQFLNDRLASYLEKVRQLERDNAELEKLIQERSQQQEPLLCPSYQSYFKTIEELQQKILCAKAENARLVVNIDNAKLASDDFRSKYQTEQSLRLLVESDINSIRRILDELTLCKSDLESQVESLREELICLKKNHEEEVNTLRSQLGDRLNVEVDTAPTVDLNQVLNETRSQYEALVEINRREVEQWFATQTEELNKQVVSSSEQLQSCQAEIIELRRTVNALEIELQAQHNLRDSLENTLTESEAHYSSQLSQVQSLITNVESQLAEIRCDLERQNQEYQVLLDVRARLECEINTYRSLLESEDCKLPCNPCATTNASGNSCGPCGTSQKGCCN

SEQ ID NO: 428 - protein, 416 aa, Homo sapiens [sequence omitted]

SEQ ID NO: 429 - protein, 201 aa, Homo sapiens
MTSDHCSSLLSGQVSEANAASLCLLANVAHANRVRVGSTPLGRLSLCLPPTCHTTCPLPGTCHIPGNIGICGAYRENTLNGHEKETMQFLNDRLANYLEKVRQLEWDNAELETKLHERSKCHESSVCRNYQSYFCTIQELQQKVRFAVHQIRGQESAYCLSAKSGPPPAFANKVLLVHGHAHAFVCCLQLLLYYSGRVQSL

SEQ ID NO: 430 - protein, 471 aa, Homo sapiens
MTSFYSTSSCPLGCTMAPGARNVFVSPIDVGCQPVAEANAASMCLLANVAHANRVRVGSTPLGRPSLCLPPTSHTACPLPGTCHIPGNIGICGAYGKNTLNGHEKETMKFLNDRLANYLEKVRQLEQENAELETTLLERSKCHESTVCPDYQSYFRTIEELQQKILCSKAENARLIVQIDNAKLAADDFRIKLESERSLHQLVEADKCGTQKLLDDATLAKADLEAQQESLKEEQLSLKSNHEQEVKILRSQLGEKFRIELDIEPTIDLNRVLGEMRAQYEAMVETNHQDVEQWFQAQSEGISLQAMSCSEELQCCQSEILELRCTVNALEVERQAQHTLKDCLQNSLCEAEDRYGTELAQMQSLISNLEEQLSEIRADLERQNQEYQVLLDVKARLENEIATYRNLTPLQSLFHACLLYFLSKLWPCHRWVSLWPWSQHGEMILKARVRRLRLVALGSGVPSPCPVFLQD

SEQ ID NO: 431 - protein, 456 aa, Homo sapiens
MTSSYSSSSCPLGCTMAPGARNVSVSPIDIGCQPGAEANIAPMCLLANVAHANRVRVGSTPLGRPSLCLPPTCHTACPLPGTCHIPGNIGICGAYGENTLNGHEKETMQFLNDRLANYLEKVRQLEQENAELEATLLERSKCHESTVCPDYQSYFHTIEELQQKILCSKAENARLIVQIDNAKLAADDFRIKLESERSLRQLVEADKCGTQKLLDDATLAKADLEAQQESLKEEQLSLKSNHEQEVKILRSQLGEKLRIELDIEPTIDLNRVLGEMRAQYEAMLETNRQDVEQWFQAQSEGISLQDMSCSEELQCCQSEILELRCTVNALEVERQAQHTLKDCLQNSLCEAEDRFGTELAQMQSLISNVEEQLSEIRADLERQNQEYQVLLDVKTRLENEIATYRNLLESEDCKLPCNPCSTSPSCVTAPCAPRPSCGPCTTCGPTCGASTTGSRF

SEQ ID NO: 432 - protein, 448 aa, Homo sapiens
MTSSCCVTNNLQASLKSCPRPASVCSSGVNCRPELCLGYVCQPMACLPSVCLPTTFRPASCLSKTYLSSSCQAASGISGSMGPGSWYSEGAFNGNEKETMQFLNDRLASYLTRVRQLEQENAELESRIQEASHSQVLTMTPDYQSHFRTIEELQQKILCTKAENARMVVNIDNAKLAADDFRAKYEAELAMRQLVEADINGLRRILDDLTLCKADLEAQVESLKEELMCLKKNHEEEVGSLRCQLGDRLNIEVDAAPPVDLTRVLEEMRCQYEAMVEANRRDVEEWFNMQMEELNQQVATSSEQLQNYQSDIIDLRRTVNTLEIELQAQHSLRDSLENTLTESEARYSSQLAQMQCMITNVEAQLAEIRADLERQNQEYQVLLDVRARLEGEINTYRSLLESEDCKLPCNPCSTPSCTTCVPSPCVTRTVCVPRTVGMPCSPCPQGRY

SEQ ID NO: 433 - protein, 425 aa, Homo sapiens
MYSSSSCKLPSLSPVARSFSACSVGLGRSSYRATSCLPALCLPAGGFATSYSGGGGWFGEGILTGNEKETMQSLNDRLAGYLEKVRQLEQENASLESRIREWCEQQVPYMCPDYQSYFRTIEELQKKTLCSKAENARLVVEIDNAKLAADDFRTKYETEVSLRQLVESDINGLRRILDDLTLCKSDLEAQVESLKEELLCLKKNHEEEVNSLRCQLGDRLNVEVDAAPPVDLNRVLEEMRCQYETLVENNRRDAEDWLDTQSEELNQQVVSSSEQLQSCQAEIIELRRTVNALEIELQAQHSMRDALESTLAETEARYSSQLAQMQCMITNVEAQLAEIRADLERQNQEYQVLLDVRARLECEINTYRGLLESEDSKLPCNPCAPDYSPSKSCLPCLPAASCGPSAARTNCSPRPICVPCPGGRF

SEQ ID NO: 434 - protein, 467 aa, Homo sapiens
MATQTCTPTFSTGSIKGLCGTAGGISRVSSIRSVGSCRVPSLAGAAGYISSARSGLSGLGSCLPGSYLSSECHTSGFVGSGGWFCEGSFNGSEKETMQFLNDRLANYLEKVRQLERENAELESRIQEWYEFQIPYICPDYQSYFKTIEDFQQKILLTKSENARLVLQIDNAKLAADDFRTKYETELSLRQLVEADINGLRRILDELTLCKADLEAQVESLKEELMCLKKNHEEEVSVLRCQLGDRLNVEVDAAPPVDLNKILEDMRCQYEALVENNRRDVEAWFNTQTEELNQQVVSSSEQLQCCQTEIIELRRTVNALEIELQAQHSMRNSLESTLAETEARYSSQLAQMQCLISNVEAQLSEIRCDLERQNQEYQVLLDVKARLEGEIATYRHLLEGEDCKLPPQPCATACKPVIRVPSVPPVPCVPSVPCTPAPQVGTQIRTITEEIRDGKVISSREHVQSRPL

SEQ ID NO: 435 - protein, 420 aa, Homo sapiens
MSLRLQSSSASYGGGFGGGSCQLGGGRGVSTCSTRFVSGGSAGGYGGGVSCGFGGGAGSGFGGGYGGGLGGGYGGGLGGGFGGGFAGGFVDFGACDGGLLTGNEKITMQNLNDRLASYLEKVRALEEANADLEVKIRDWHLKQSPASPERDYSPYYKTIEELRDKILTATIENNRVILEIDNARLAVDDFRLKYENELALRQSVEADINGLRRVLDELTLSKTDLEMQIESLNEELAYMKKNHEEEMKEFSNQVVGQVNVEMDATPGIDLTRVLAEMREQYEAMAERNRRDAEEWFHAKSAELNKEVSTNTAMIQTSKTEITELRRTLQGLEIELQSQLSMKAGLENTVAETECRYALQLQQIQGLISSIEAQLSELRSEMECQNQEYKMLLDIKTRLEQEIATYRSLLEGQDAKKRQPP

SEQ ID NO: 436 - protein, 456 aa, Homo sapiens
MTTTFLQTSSSTFGGGSTRGGSLLAGGGGFGGGSLSGGGGSRSISASSARFVSSGSGGGYGGGMRVCGFGGGAGSVFGGGFGGGVGGGFGGGFGGGDGGLLSGNEKITMQNLNDRLASYLDKVRALEEANADLEVKIHDWYQKQTPTSPECDYSQYFKTIEELRDKIMATTIDNSRVILEIDNARLAADDFRLKYENELALRQGVEADINGLRRVLDELTLARTDLEMQIEGLNEELAYLKKNHEEEMKEFSSQLAGQVNVEMDAAPGVDLTRVLAEMREQYEAMAEKNRRDVEAWFFSKTEELNKEVASNTEMIQTSKTEITDLRRTMQELEIELQSQLSMKAGLENSLAETECRYATQLQQIQGLIGGLEAQLSELRCEMEAQNQEYKMLLDIKTRLEQEIATYRSLLEGQDAKMAGIGIREASSGGGGSSSNFHINVEESVDGQVVSSHKREI

SEQ ID NO: 437 - protein, 400 aa, Homo sapiens
MTSYSYRQSSATSSFGGLGGGSVRFGPGVAFRAPSIHGGSGGRGVSVSSARFVSSSSSGAYGGGYGGVLTASDGLLAGNEKLTMQNLNDRLASYLDKVRALEAANGELEVKIRDWYQKQGPGPSRDYSHYYTTIQDLRDKILGATIENSRIVLQIDNARLAADDFRTKFETEQALRMSVEADINGLRRVLDELTLARTDLEMQIEGLKEELAYLKKNHEEEISTLRGQVGGQVSVEVDSAPGTDLAKILSDMRSQYEVMAEQNRKDAEAWFTSRTEELNREVAGHTEQLQMSRSEVTDLRRTLQGLEIELQSQLSMKAALEDTLAETEARFGAQLAHIQALISGIEAQLGDVRADSERQNQEYQRLMDIKSRLEQEIATYRSLLEGQEDHYNNLSASKVL

SEQ ID NO: 438 - protein, 622 aa, Homo sapiens
MSCRQFSSSYLTSGGGGGGGLGSGGSIRSSYSRFSSSGGRGGGGRFSSSSGYGGGSSRVCGRGGGGSFGYSYGGGSGGGFSASSLGGGFGGGSRGFGGASGGGYSSSGGFGGGFGGGSGGGFGGGYGSGFGGLGGFGGGAGGGDGGILTANEKSTMQELNSRLASYLDKVQALEEANNDLENKIQDWYDKKGPAAIQKNYSPYYNTIDDLKDQIVDLTVGNNKTLLDIDNTRMTLDDFRIKFEMEQNLRQGVDADINGLRQVLDNLTMEKSDLEMQYETLQEELMALKKNHKEEMSQLTGQNSGDVNVEINVAPGKDLTKTLNDMRQEYEQLIAKNRKDIENQYETQITQIEHEVSSSGQEVQSSAKEVTQLRHGVQELEIELQSQLSKKAALEKSLEDTKNRYCGQLQMIQEQISNLEAQITDVRQEIECQNQEYSLLLSIKMRLEKEIETYHNLLEGGQEDFESSGAGKIGLGGRGGSGGSYGRGSRGGSGGSYGGGGSGGGYGGGSGSRGGSGGSYGGGSGSGGGSGGGYGGGSGGGHSGGSGGGHSGGSGGNYGGGSGSGGGSGGGYGGGSGSRGGSGGSHGGGSGFGGESGGSYGGGEEASGSGGGYGGGSGKSSHS

SEQ ID NO: 439 - protein, 472 aa, Homo sapiens
MTTCSRQFTSSSSMKGSCGIGGGIGGGSSRISSVLAGGSCRAPSTYGGGLSVSSSRFSSGGAYGLGGGYGGGFSSSSSSFGSGFGGGYGGGLGAGLGGGFGGGFAGGDGLLVGSEKVTMQNLNDRLASYLDKVRALEEANADLEVKIRDWYQRQRPAEIKDYSPYFKTIEDLRNKILTATVDNANVLLQIDNARLAADDFRTKYETELNLRMSVEADINGLRRVLDELTLARADLEMQIESLKEELAYLKKNHEEEMNALRGQVGGDVNVEMDAAPGVDLSRILNEMRDQYEKMAEKNRKDAEEWFFTKTEELNREVATNSELVQSGKSEISELRRTMQNLEIELQSQLSMKASLENSLEETKGRYCMQLAQIQEMIGSVEEQLAQLRCEMEQQNQEYKILLDVKTRLEQEIATYRRLLEGEDAHLSSSQFSSGSQSSRDVTSSSRQIRTKVMDVHDGKVVSTHEQVLRTKN

SEQ ID NO: 440 - protein, 473 aa, Homo sapiens
MTTCSRQFTSSSSMKGSCGIGGGIGGGSSRISSVLAGGSCRAPSTYGGGLSVSSRFSSGGACGLGGGYGGGFSSSSSFGSGFGGGYGGGLGAGFGGGLGAGFGGGFAGGDGLLVGSEKVTMQNLNDRLASYLDKVRALEEANADLEVKIRDWYQRQRPSEIKDYSPYFKTIEDLRNKIIAATIENAQPILQIDNARLAADDFRTKYEHELALRQTVEADVNGLRRVLDELTLARTDLEMQIEGLKEELAYLRKNHEEEMLALRGQTGGDVNVEMDAAPGVDLSRILNEMRDQYEQMAEKNRRDAETWFLSKTEELNKEVASNSELVQSSRSEVTELRRVLQGLEIELQSQLSMKASLENSLEETKGRYCMQLSQIQGLIGSVEEQLAQLRCEMEQQSQEYQILLDVKTRLEQEIATYRRLLEGEDAHLSSQQASGQSYSSREVFTSSSSSSSRQTRPILKEQSSSSFSQGQSS

SEQ ID NO: 441 - protein, 432 aa, Homo sapiens
MTTSIRQFTSSSSIKGSSGLGGGSSRTSCRLSGGLGAGSCRLGSAGGLGSTLGGSSYSSCYSFGSGGGYGSSFGGVDGLLAGGEKATMQNLNDRLASYLDKVRALEEANTELEVKIRDWYQRQAPGPARDYSQYYRTIEELQNKILTATVDNANILLQIDNARLAADDFRTKFETEQALRLSVEADINGLRRVLDELTLARADLEMQIENLKEELAYLKKNHEEEMNALRGQVGGEINVEMDAAPGVDLSRILNEMRDQYEKMAEKNRKDAEDWFFSKTEELNREVATNSELVQSGKSEISELRRTMQALEIELQSQLSMKASLEGNLAETENRYCVQLSQIQGLIGSVEEQLAQLRCEMEQQNQEYKILLDVKTRLEQEIATYRRLLEGEDAHLTQYKKEPVTTRQVRTIVEEVQDGKVISSREQVHQTTR

SEQ ID NO: 442 - protein, 469 aa, Homo sapiens
MSIHFSSPVFTSRSAAFSGRGAQVRLSSARPGGLGSSSLYGLGASRPRVAVRSAYGGPVGAGIREVTINQSLLAPLRLDADPSLQRVRQEESEQIKTLNNKFASFIDKVRFLEQQNKLLETKWTLLQEQKSAKSSRLPDIFEAQIAGLRGQLEALQVDGGRLEAELRSMQDVVEDFKNKYEDEINRRTAAENEFVVLKKDVDAAYMSKVELEAKVDALNDEINFLRTLNETELTELQSQISDTSVVLSMDNSRSLDLDGIIAEVKAQYEEMAKCSRAEAEAWYQTKFETLQAQAGKHGDDLRNTRNEISEMNRAIQRLQAEIDNIKNQRAKLEAAIAEAEERGELALKDARAKQEELEAALQRAKQDMARQLREYQELMSVKLALDIEIATYRKLLEGEESRLAGDGVGAVNISVMNSTGGSSSGGGIGLTLGGTMGSNALSFSSSAGPGLLKAYSIRTASASRRSARD

SEQ ID NO: 443 - protein, 486 aa, Homo sapiens
MTCGSYCGGRAFSCISACGPRPGRCCITAAPYRGISCYRGLTGGFGSHSVCGGFRAGSCGRSFGYRSGGVCGPSPPCITTVSVNESLLTPLNLEIDPNAQCVKQEEKEQIKSLNSRFAAFIDKVRFLEQQNKLLETKLQFYQNRECCQSNLEPLFEGYIETLRREAECVEADSGRLASELNHVQEVLEGYKKKYEEEVSLRATAENEFVALKKDVDCAYLRKSDLEANVEALIQEIDFLRRLYEEEIRVLQSHISDTSVVVKLDNSRDLNMDCIIAEIKAQYDDIVTRSRAEAESWYRSKCEEMKATVIRHGETLRRTKEEINELNRMIQRLTAEVENAKCQNSKLEAAVAQSEQQGEAALSDARCKLAELEGALQKAKQDMACLIREYQEVMNSKLGLDIEIATYRRLLEGEEQRLCEGVGSVNVCVSSSRGGVVCGDLCASTTAPVVSTRVSSVPSNSNVVVGTTNACAPSARVGVCGGSCKRC

SEQ ID NO: 444 - protein, 111 aa, Homo sapiens
MKATVIWHGETVGCTKEEIKELTHMIQRLMAKVENAKCQVWGICAQGQRDLWPNLCHTAYVCPTWISAFILQSLCPCRVPGCGQSGSARMMKARGLFLRCSQLNGRLDIFR

SEQ ID NO: 445 - protein, 505 aa, Homo sapiens
MTCGSGFGGRAFSCISACGPRPGRCCITAAPYRGISCYRGLTGGFGSHSVCGGFRAGSCGRSFGYRSGGVCGPSPPCITTVSVNESLLTPLNLEIDPNAQCVKQEEKEQIKSLNSRFAAFIDKVRFLEQQNKLLETKLQFYQNRECCQSNLEPLFEGYIETLRREAECVEADSGRLASELNHVQEVLEGYKKKYEEEVSLRATAENEFVALKKDVDCAYLRKSDLEANVEALIQEIDFLRRLYEEEIRILQSHISDTSVVVKLDNSRDLNMDCIIAEIKAQYDDIVTRSRAEAESWYRSKCEEMKATVIRHGETLRRTKEEINELNRMIQRLTAEVENAKCQNSKLEAAVAQSEQQGEAALSDARCKLAELEGALQKAKQDMACLIREYQEVMNSKLGLDIEIATYRRLLEGEEQRLCEGIGAVNVCVSSSRGGVVCGDLCVSGSRPVTGSVCSAPCNGNVAVSTGLCAPCGQLNTTCGGGSCGVGSCGISSLGVGSCGSSCRKC

SEQ ID NO: 446 - protein, 486 aa, Homo sapiens; identical to SEQ ID NO: 443

SEQ ID NO: 447 - protein, 493 aa, Homo sapiens
MTCGFNSIGCGFRPGNFSCVSACGPRPSRCCITAAPYRGISCYRGLTGGFGSHSVCGGFRAGSCGRSFGYRSGGVCGPSPPCITTVSVNESLLTPLNLEIDPNAQCVKQEEKEQIKSLNSRFAAFIDKVRFLEQQNKLLETKLQFYQNCECCQSNLEPLFAGYIETLRREAECVEADSGRLASELNHVQEVLEGYKKKYEEEVALRATAENEFVALKKDVDCAYLRKSDLEANVEALIQEIDFLRRLYEEEIRILQSHISDTSVVVKLDNSRDLNMDCIVAEIKAQYDDIATRSRAEAESWYRSKCEEMKATVIRHGETLRRTKEEINELNRMIQRLTAEVENAKCQNSKLEAAVAQSEQQGEAALSDARCKLAELEGALQKAKQDMACLIREYQEVMNSKLGLDIEIATYRRLLEGEEQRLCEGVEAVNVCVSSSRGGVVCGDLCVSGSRPVTGSVCSAPCNGNLVVSTGLCKPCGQLNTTCGGGSCGQGRY

SEQ ID NO: 448 - protein, 143 aa, Homo sapiens [sequence omitted]

SEQ ID NO: 449 - protein, 507 aa, Homo sapiens
MSCRSYRISSGCGVTRNFSSCSAVAPKTGNRCCISAAPYRGVSCYRGLTGFGSRSLCNLGSCGPRIAVGGFRAGSCGRSFGYRSGGVCGPSPPCITTVSVNESLLTPLNLEIDPNAQCVKQEEKEQIKSLNSRFAAFIDKVRFLEQQNKLLETKWQFYQNQRCCESNLEPLFSGYIETLRREAECVEADSGRLASELNHVQEVLEGYKKKYEEEVALRATAENEFVVLKKDVDCAYLRKSDLEANVEALVEESSFLRRLYEEEIRVLQAHISDTSVIVKMDNSRDLNMDCIIAEIKAQYDDVASRSRAEAESWYRSKCEEMKATVIRHGETLRRTKEEINELNRMIQRLTAEIENAKCQRAKLEAAVAEAEQQGEAALSDARCKLAELEGALQKAKQDMACLLKEYQEVMNSKLGLDIEIATYRRLLEGEEHRLCEGVGSVNVCVSSSRGGVSCGGLSYSTTPGRQITSGPSAIGGSITVVAPDSCAPCQPRSSSFSCGSSRSVRFA

SEQ ID NO: 450 - protein, 600 aa, Homo sapiens
MSCRSYRVSSGHRVGNFSSCSAMTPQNLNRFRANSVSCWSGPGFRGLGSFGSRSVITFGSYSPRIAAVGSRPIHCGVRFGAGCGMGFGDGRGVGLGPRADSCVGLGFGAGSGIGYGFGGPGFGYRVGGVGVPAAPSITAVTVNKSLLTPLNLEIDPNAQRVKKDEKEQIKTLNNKFASFIDKVRFLEQQNKLLETKWSFLQEQKCIRSNLEPLFESYITNLRRQLEVLVSDQARLQAERNHLQDVLEGFKKKYEEEVVCRANAENEFVALKKDVDAAFMNKSDLEANVDTLTQEIDFLKTLYMEEIQLLQSHISETSVIVKMDNSRDLNLDGIIAEVKAQYEEVARRSRADAEAWYQTKYEEMQVTAGQHCDNLRNIRNEINELTRLIQRLKAEIEHAKAQRAKLEAAVAEAEQQGEATLSDAKCKLADLECALQQAKQDMARQLCEYQELMNAKLGLDIEIATYRRLLEGEESRLCEGVGPVNISVSSSRGGLVCGPEPLVAGSTLSRGGVTFSGSSSVCATSGVLASCGPSLGGARVAPATGDLLSTGTRSGSMLISEACVPSVPCPLPTQGGFSSCSGGRSSSVRFVSTTTSCRTKY

SEQ ID NO: 451 - protein, 513 aa, Homo sapiens
MSYHSFQPGSRCGSQSFSSYSAVMPRMVTHYAVSKGPCRPGGGRGLRALGCLGSRSLCNVGFGRPRVASRCGGTLPGFGYRLGATCGPSACITPVTINESLLVPLALEIDPTVQRVKRDEKEQIKCLNNRFASFINKVRFLEQKNKLLETKWNFMQQQRCCQTNIEPIFEGYISALRRQLDCVSGDRVRLESELCSLQAALEGYKKKYEEELSLRPCVENEFVALKKDVDTAFLMKADLETNAEALVQEIDFLKSLYEEEICLLQSQISETSVIVKMDNSRELDVDGIIAEIKAQYDDIASRSKAEAEAWYQCRYEELRVTAGNHCDNLRNRKNEILEMNKLIQRLQQETENVKAQRCKLEGAIAEAEQQGEAALNDAKCKLAGLEEALQKAKQDMACLLKEYQEVMNSKLGLDIEIATYRRLLEGEEHRLCEGIGPVNISVSSSKGAFLYEPCGVSTPVLSTGVLRSNGGCSIVGTGELYVPCEPQGLLSCGSGRKSSMTLGAGGSSPSHKH

SEQ ID NO: 452 - protein, 85 aa, Homo sapiens [sequence omitted]

SEQ ID NO: 453 - protein, 564 aa, Homo sapiens
MASTSTTIRSHSSSRRGFSASSARLPGVSRSGFSSISVSRSRGSGGLGGACGGAGFGSRSLYGLGGSKRISIGGGSCAISGGYGSRAGGSYGFGGAGSGFGFGGGAGIGFGLGGGAGLAGGFGGPGFPVCPPGGIQEVTVNQSLLTPLNLQIDPAIQRVRAEEREQIKTLNNKFASFIDKVRFLEQQNKVLDTKWTLLQEQGTKTVRQNLEPLFEQYINNLRRQLDSIVGERGRLDSELRNMQDLVEDLKNKYEDEINKRTAAENEFVTLKKDVDAAYMNKVELQAKADTLTDEINFLRALYDAELSQMQTHISDTSVVLSMDNNRNLDLDSIIAEVKAQYEEIAQRSRAEAESWYQTKYEELQVTAGRHGDDLRNTKQEIAEINRMIQRLRSEIDHVKKQCANLQAAIADAEQRGEMALKDAKNKLEGLEDALQKAKQDLARLLKEYQELMNVKLALDVEIATYRKLLEGEECRLNGEGVGQVNISVVQSTVSSGYGGASGVGSGLGLGGGSSYSYGSGLGVGGGFSSSSGRATGGGLSSVGGGSSTIKYTTTSSSSRKSYKH

SEQ ID NO: 454 - protein, 564 aa, Homo sapiens
MASTSTTIRSHSSSRRGFSANSARLPGVSRSGFSSISVSRSRGSGGLGGACGGAGFGSRSLYGLGGSKRISIGGGSCAISGGYGSRARGSYGFGGAGSGFGFGGGAGIGFDLGGGAGLAGGFGGPGFPVCPPGGIQEVTVNQSLLTPLNLQIDPAIQRVRAEEREQIKTLNNKFASFIDKVRFLEQQNKVLDTKWTLLQEQGTKTVRQNLEPLFEQYINNLRRQLDNIVGERGRLDSELRNMQDLVEDLKNKYEDEINKRTAAENEFVTLKKDVDAAYMNKVELQAKADTLTDEINFLRALYDAELSQMQTHISDTSVVLSMDNNRNLDLDSIIAEVKAQYEEIAQRSRAEAESWYQTKYEELQVTAGRHGDDLRNTKQEIAEINRMIQRLRSEIDHVKKQCASLQAAIADAEQRGEMALKDAKNKLEGLEDALQKAKQDLARLLKEYQELMNVKLALDVEIATYRKLLEGEECRLNGEGIGQVNVSVVQSTISSGYGGASGVGSGLGLGGGSSYSYGSGLGIGGGFSSSSGRAIGGGLSSVGGGSSTIKYTTTSSSSRKSYKH

SEQ ID NO: 455 - protein, 564 aa, Homo sapiens
MASTSTTIRSHSSSRRGFSANSARLPGVSRSGFSSISVSRSRGSGGLGGACGGAGFGSRSLYGLGGSKRISIGGGSCAISGGYGSRARASYGFGGAGSGFGFGGGAGIGFDLGGGAGLAGGFGGPGFPVCPPGGIQEVTVNQSLLTPLNLQIDPAIQRVRAEEREQIKTLNNKFASFIDKVRFLEQQNKVLETKWTLLQEQGTKTVRQNLEPLFEQYINNLRRQLDSIVGERGRLDSELRGMQDLVEDFKNKYEDEINKRTAAENEFVTLKKDVDAAYMNKVELQAKADTLTDEINFLRALYDAELSQMQTHISDTSVVLSMDNNRNLDLDSIIAEVKAQYEEIAQRSRAEAESWYQTKYEELQVTAGRHGDDLRNTKQEIAEINRMIQRLRSEIDHVKKQCANLQAAIADAEQRGEMALKDAKNKLEGLEDALQKAKQDLARLLKEYQELMNVKLALDVEIATYRKLLEGEECRLNGEGVGQVNISVVQSTVSSGYGGASGVGSGLGLGGGSSYSYGSGLGVGGGFSSSSGRAIGGGLSSVGGGSSTIKYTTTSSSSRKSYKH

SEQ ID NO: 456 - protein, 564 aa, Homo sapiens
MASTSTTIRSHSSSRRGFSANSARLPGVSRSGFSSVSVSRSRGSGGLGGACGGAGFGSRSLYGLGGSKRISIGGGSCAISGGYGSRAGGSYGFGGAGSGFGFGGGAGIGFGLGGGAGLAGGFGGPGFPVCPPGGIQEVTVNQSLLTPLNLQIDPTIQRVRAEEREQIKTLNNKFASFIDKVRFLEQQNKVLETKWTLLQEQGTKTVRQNLEPLFEQYINNLRRQLDSIVGERGRLDSELRGMQDLVEDFKNKYEDEINKRTAAENEFVTLKKDVDAAYMNKVELQAKADTLTDEINFLRALYDAELSQMQTHISDTSVVLSMDNNRNLDLDSIIAEVKAQYEEIAQRSRAEAESWYQTKYEELQVTAGRHGDDLRNTKQEIAEINRMIQRLRSEIDHVKKQCANLQAAIADAEQRGEMALKDAKNKLEGLEDALQKAKQDLARLLKEYQELMNVKLALDVEIATYRKLLEGEECRLNGEGVGQVNISVVQSTVSSGYGGASGVGSGLGLGGGSSYSYGSGLGVGGGFSSSSGRAIGGGLSSVGGGSSTIKYTTTSSSSRKSYKH

SEQ ID NO: 457 - protein, 590 aa, Homo sapiens
MSRQSSVSFRSGGSRSFSTASAITPSVSRTSFTSVSRSGGGGGGGFGRVSLAGACGVGGYGSRSLYNLGGSKRISISTRGGSFRNRFGAGAGGGYGFGGGAGSGFGFGGGAGGGFGLGGGAGFGGGFGGPGFPVCPPGGIQEVTVNQSLLTPLNLQIDPSIQRVRTEEREQIKTLNNKFASFIDKVRFLEQQNKVLDTKWTLLQEQGTKTVRQNLEPLFEQYINNLRRQLDSIVGERGRLDSELRNMQDLVEDFKNKYEDEINKRTTAENEFVMLKKDVDAAYMNKVELEAKVDALMDEINFMKMFFDAELSQMQTHVSDTSVVLSMDNNRNLDLDSIIAEVKAQYEEIANRSRTEAESWYQTKYEELQQTAGRHGDDLRNTKHEITEMNRMIQRLRAEIDNVKKQCANLQNAIADAEQRGELALKDARNKLAELEEALQKAKQDMARLLREYQELMNTKLALDVEIATYRKLLEGEECRLSGEGVGPVNISVVTSSVSSGYGSGSGYGGGLGGGLGGGLGGGLAGGSSGSYYSSSSGGVGLGGGLSVGGSGFSASSGRGLGVGFGSGGGSSSSVKFVSTTSSSRKSFKS

SEQ ID NO: 458 - protein, 523 aa, Homo sapiens
MSRQFTCKSGAAAKGGFSGCSAVLSGGSSSSFRAGSKGLSGGFGSRSLYSLGGVRSLNVASGSGKSGGYGFGRGRASGFAGSMFGSVALGPVCPTVCPPGGIHQVTVNESLLAPLNVELDPEIQKVRAQEREQIKALNNKFASFIDKVRFLEQQNQVLETKWELLQQLDLNNCKNNLEPILEGYISNLRKQLETLSGDRVRLDSELRNVRDVVEDYKKRYEEEINKRTAAENEFVLLKKDVDAAYANKVELQAKVESMDQEIKFFRCLFEAEITQIQSHISDMSVILSMDNNRNLDLDSIIDEVRTQYEEIALKSKAEAEALYQTKFQELQLAAGRHGDDLKNTKNEISELTRLIQRIRSEIENVKKQASNLETAIADAEQRGDNALKDARAKLDELEGALHQAKEELARMLREYQELMSLKLALDMEIATYRKLLESEECRMSGEFPSPVSISIISSTSGGSVYGFRPSMVSGGYVANSSNCISGVCSVRGGEGRSRGSANDYKDTLGKGSSLSAPSKKTSR

SEQ ID NO: 459 - protein, 529 aa, Homo sapiens
MSRQLNIKSSGDKGNFSVHSAVVPRKAVGSLASYCAAGRGAGAGFGSRSLYSLGGNRRISFNVAGGGVRAGGYGFRPGSGYGGGRASGFAGSMFGSVALGPACLSVCPPGGIHQVTVNKSLLAPLNVELDPEIQKVRAQEREQIKVLNDKFASFIDKVRFLEQQNQVLETKWELLQQLDLNNCKKNLEPILEGYISNLRKQLETLSGDRVRLDSELRSMRDLVEDYKKRYEVEINRRTTAENEFVVLKKDADAAYAVKVELQAKVDSLDKDIKFLKCLYDAEIAQIQTHASETSVILSMDNNRDLDLDSIIAEVRMHYEEIALKSKAEAEALYQTKIQELQLAASRHGDDLKHTRSEMVELNRLIQRIRCEIGNVKKQRASLETAIADAEQRGDNALKDAQAKLDELEGALHQAKEELARMLREYQELMSLKLALDMEIATYRKLLEGEECRMSGENPSSVSISVISSSSYSYHHPSSAGVDLGASAVAGSSGSTQSGQTKTTEARGGDLKDTQGKSTPASIPARKATR

SEQ ID NO: 460 - protein, 511 aa, Homo sapiens
MSRQLTHFPRGERLGFSGCSAVLSGGIGSSSASFRARVKGSASFGSKSLSCLGGSRSLALSAAARRGGGRLGGFVGTAFGSAGLGPKCPSVCPPGGIPQVTVNKSLLAPLNVEMDPEIQRVRAQEREQIKALNNKFASFIDKVRFLEQQNQVLETKWNLLQQLDLNNCRKNLEPIYEGYISNLQKQLEMLSGDGVRLDSELRNMQDLVEDYKKRYEVEINRRTAAENEFVVLKKDVDAAYMNKVELQAKVDSLTDEIKFFKCLYEGEITQIQSHISDTSIVLSMDNNRDLDLDSIIAEVRAQYEEIALKSKAEAETLYQTKIQELQVTAGQHGDDLKLTKAEISELNRLIQRIRSEIGNVKKQCADLETAIADAEQRGDCALKDARAKLDELEGALHQAKEELARMLREYQELVSLKLALDMEIATYRKLLESEECRMSGEYPNSVSISVISSTNAGAGGAGFSMGFGASSSYSYKTAAADVKTKGSCGSELKDPLAKTSGSSCATKKASR

SEQ ID NO: 461 - protein, 540 aa, Homo sapiens
MSRQFTYKSGAAAKGGFSGCSAVLSGGSSSSYRAGGKGLSGGFSSRSLYSLGGARSISFNVASGSGWAGGYGFGRGRASGFAGSMFGSVALGSVCPSLCPPGGIHQVTINKSLLAPLNVELDPEIQKVRAQEREQIKVLNNKFASFIDKVRFLEQQNQVLETKWELLQQLDLNNCKNNLEPILEGYISNLRKQLETLSGDRVRLDSELRSVREVVEDYKKRYEEEINKRTTAENEFVVLKKDVDAAYTSKVELQAKVDALDGEIKFFKCLYEGETAQIQSHISDTSIILSMDNNRNLDLDSIIAEVRAQYEEIARKSKAEAEALYQTKFQELQLAAGRHGDDLKHTKNEISELTRLIQRLRSEIESVKKQCANLETAIADAEQRGDCALKDARAKLDELEGALQQAKEELARMLREYQELLSVKLSLDIEIATYRKLLEGEECRMSGEYTNSVSISVINSSMAGMAGTGAGFGFSNAGTYGYWPSSVSGGYSMLPGGCVTGSGNCSPRGEARTRLGSASEFRDSQGKTLALSSPTKKTMR

SEQ ID NO: 462 - protein, 645 aa, Homo sapiens
MSCQISCKSRGRGGGGGGFRGFSSGSAVVSGGSRRSTSSFSCLSRHGGGGGGFGGGGFGSRSLVGLGGTKSISISVAGGGGGFGAAGGFGGRGGGFGGGSGFGGGSGFGGGSGFSGGGFGGGGFGGGRFGGFGGPGGVGGLGGPGGFGPGGYPGGIHEVSVNQSLLQPLNVKVDPEIQNVKAQEREQIKTLNNKFASFIDKVRFLEQQNQVLQTKWELLQQMNVGTRPINLEPIFQGYIDSLKRYLDGLTAERTSQNSELNNMQDLVEDYKKKYEDEINKRTAAENDFVTLKKDVDNAYMIKVELQSKVDLLNQEIEFLKVLYDAEISQIHQSVTDTNVILSMDNSRNLDLDSIIAEVKAQYEEIAQRSKEEAEALYHSKYEELQVTVGRHGDSLKEIKIEISELNRVIQRLQGEIAHVKKQCKNVQDAIADAEQRGEHALKDARNKLNDLEEALQQAKEDLARLLRDYQELMNVKLALDVEIATYRKLLEGEECRMSGDLSSNVTVSVTSSTISSNVASKAAFGGSGGRGSSSGGGYSSGSSSYGSGGRQSGSRGGSGGGGSISGGGYGSGGGSGGRYGSGGGSKGGSISGGGYGSGGGKHSSGGGSRGGSSSGGGYGSGGGGSSSVKGSSGEAFGSSVTFSFR

SEQ ID NO: 463 - protein, 644 aa, Homo sapiens
MSRQFSSRSGYRSGGGFSSGSAGIINYQRRTTSSSTRRSGGGGGRFSSCGGGGGSFGAGGGFGSRSLVNLGGSKSISISVARGGGRGSGFGGGYGGGGFGGGGFGGGGFGGGGIGGGGFGGFGSGGGGFGGGGFGGGGYGGGYGPVCPPGGIQEVTINQSLLQPLNVEIDPEIQKVKSREREQIKSLNNQFASFIDKVRFLEQQNQVLQTKWELLQQVDTSTRTHNLEPYFESFINNLRRRVDQLKSDQSRLDSELKNMQDMVEDYRNKYEDEINKRTNAENEFVTIKKDVDGAYMTKVDLQAKLDNLQQEIDFLTALYQAELSQMQTQISETNVILSMDNNRSLDLDSIIAEVKAQYEDIAQKSKAEAESLYQSKYEELQITAGRHGDSVRNSKIEISELNRVIQRLRSEIDNVKKQISNLQQSISDAEQRGENALKDAKNKLNDLEDALQQAKEDLARLLRDYQELMNTKLALDLEIATYRTLLEGEESRMSGECAPNVSVSVSTSHTTISGGGSRGGGGGGYGSGGSSYGSGGGSYGSGGGGGGGRGSYGSGGSSYGSGGGSYGSGGGGGGHGSYGSGSSSGGYRGGSGGGGGGSSGGRGSGGGSSGGSIGGRGSSSGGVKSSGGSSSVRFVSTTYSGVTR

SEQ ID NO: 464 - protein, 629 aa, Homo sapiens
MSRQASKTSGGGSQGFSGRSAVVSGSSRMSCVAHSGGAGGGAYGFRSGAGGFGSRSLYNLGGNKSISISVAAGGSRAGGFGGGRSSCAFAGGYGGGFGSGYGGGFGGGFGGGRGMGGGFGGAGGFGGAGGFGGAGGFGGPGGFGGSGGFGGPGSLGSPGGFAPGGFPGGIQEVTTNQSLLQPLKVETDPQIGQVKAQEREQIKTLNNKFASFIDKVRFLEQQNKVLETKWNLLQQQGTSSISGTNNLEPLFENHINYLRSYLDNILGERGRLDSELKNMEDLVEDFKKKYEDEINKRTAAENEFVTLKKDVDSAYMNKVELQAKVDALIDEIDFLRTLYDAELSQMQSHISDTSVVLSMDNNRSLDLDSIIAEVGAQYEDIAQRSKAEAEALYQTKLGELQTTAGRHGDDLRNTKSEIIELNRMIQRLRAEIEGVKKQNANLQTAIAQAEQHGEMALKDANAKLQELQAALQQAKDDLARLLRDYQELMNVKLALDVEIATYRKLLEGEEYSRMSGECPSAVSISVVSSSTTSASAGGYGGGYGGGMGGGLGGGFSAGGGSGIGFGRGGGGGIGGGFGGGTSGFSGGSGFGSISGARYGVSGGGFSSASNRGGSIKFSQSSQSSQRYSR

SEQ ID NO: 465 - protein, 534 aa, Homo sapiens
MIARQQCVRGGPRGFSCGSAIVGGGKRGAFSSVSMSGGAGRCSSGGFGSRSLYNLRGNKSISMSVAGSRQGACFGGAGGFGTGGFGAGGFGAGFGTGGFGGGFGGSFSGKGGPGFPVCPAGGIQEVTINQSLLTPLHVEIDPEIQKVRTEEREQIKLLNNKFASFIDKVQFLEQQNKVLETKWNLLQQQTTTTSSKNLEPLFETYLSVLRKQLDTLGNDKGRLQSELKTMQDSVEDFKTKYEEEINKRTAAENDFVVLKKDVDAAYLNKVELEAKVDSLNDEINFLKVLYDAELSQMQTHVSDTSVVLSMDNNRNLDLDSIIAEVRAQYEEIAQRSKAEAEALYQTKVQQLQISVDQHGDNLKNTKSEIAELNRMIQRLRAEIENIKKQCQTLQVSVADAEQRGENALKDAHSKRVELEAALQQAKEELARMLREYQELMSVKLALDIEIATYRKLLEGEEYRMSGECQSAVSISVVSGSTSTGGISGGLGSGSGFGLSSGFGSGSGSGFGFGGSVSGSSSSKIISTTTLNKRR

SEQ ID NO: 466 - protein, 483 aa, Homo sapiens
MSIRVTQKSYKVSTSGPRAFSSRSYTSGPGSRISSSSFSRVGSSNFRGGLGGGYGGASGMGGITAVTVNQSLLSPLVLEVDPNIQAVRTQEKEQIKTLNNKFASFIDKVRFLEQQNKMLETKWSLLQQQKTARSNMDNMFESYINNLRRQLETLGQEKLKLEAELGNMQGLVEDFKNKYEDEINKRTEMENEFVLIKKDVDEAYMNKVELESRLEGLTDEINFLRQLYEEEIRELQSQISDTSVVLSMDNSRSLDMDSIIAEVKAQYEDIANRSRAEAESMYQIKYEELQSLAGKHGDDLRRTKTEISEMNRNISRLQAEIEGLKGQRASLEAAIADAEQRGELAIKDANAKLSELEAALQRAKQDMARQLREYQELMNVKLALDIEIATYRKLLEGEESRLESGMQNMSIHTKTTSGYAGGLSSAYGGLTSPGLSYSLGSSFGSGAGSSSFSRTSSSRAVVVKKIETRDGKLVSESSDVLPK

SEQ ID NO: 467 - protein, 430 aa, Homo sapiens
MSFTTRSTFSTNYRSLGSVQAPSYGARPVSSAASVYAGAGGSGSRISVSRSTSFRGGMGSGGLATGIAGGLAGMGGIQNEKETMQSLNDRLASYLDRVRSLETENRRLESKIREHLEKKGPQVRDWSHYFKIIEDLRAQIFANTVDNARIVLQIDNARLAADDFRVKYETELAMRQSVENDIHGLRKVIDDTNITRLQLETEIEALKEELLFMKKNHEEEVKGLQAQIASSGLTVEVDAPKSQDLAKIMADIRAQYDELARKNREELDKYWSQQIEESTTVVTTQSAEVGAAETTLTELRRTVQSLEIDLDSMRNLKASLENSLREVEARYALQMEQLNGILLHLESELAQTRAEGQRQAQEYEALLNIKVKLEAEIATYRRLLEDGEDFNLGDALDSSNSMQTIQKTTTRRIVDGKVVSETNDTKVLRH

SEQ ID NO: 468 - protein, 392 aa, Homo sapiens
MVARVGLLLRALQLLLWGHLDAQPAERGGQELRKEAEAFLEKYGYLNEQVPKAPTSTRFSDAIRAFQWVSQLPVSGVLDRATLRQMTRPRCGVTDTNSYAAWAERISDLFARHRTKMRRKKRFAKQGNKWYKQHLSYRLVNWPEHLPEPAVRGAVRAAFQLWSNVSALEFWEAPATGPADIRLTFFQGDHNDGLGNAFDGPGGALAHAFLPRRGEAHFDQDERWSLSRRRGRNLFVVLAHEIGHTLGLTHSPAPRALMAPYYKRLGRDALLSWDDVLAVQSLYGKPLGGSVAVQLPGKLFTDFETWDSYSPQGRRPETQGPKYCHSSFDAITVDRQQQLYIFKGSHFWEVAADGNVSEPRPLQERWVGLPPNIEAAAVSLNDGDFYFFKVQS

SEQ ID NO: 469 - protein, 851 aa, Homo sapiens
MAQWEMLQNLDSPFQDQLHQLYSHSLLPVDIRQYLAVWIEDQNWQEAALGSDDSKATMLFFHFLDQLNYECGRCSQDPESLLLQHNLRKFCRDIQPFSQDPTQLAEMIFNLLLEEKRILIQAQRAQLEQGEPVLETPVESQQHEIESRILDLRAMMEKLVKSISQLKDQQDVFCFRYKIQAKGKTPSLDPHQTKEQKILQETLNELDKRRKEVLDASKALLGRLTTLIELLLPKLEEWKAQQQKACIRAPIDHGLEQLETWFTAGAKLLFHLRQLLKELKGLSCLVSYQDDPLTKGVDLRNAQVTELLQRLLHRAFVVETQPCMPQTPHRPLILKTGSKFTVRTRLLVRLQEGNESLTVEVSIDRNPPQLQGFRKFNILTSNQKTLTPEKGQSQGLIWDFGYLTLVEQRSGGSGKGSNKGPLGVTEELHIISFTVKYTYQGLKQELKTDTLPVVIISNMNQLSIAWASVLWFNLLSPNLQNQQFFSNPPKAPWSLLGPALSWQFSSYVGRGLNSDQLSMLRNKLFGQNCRTEDPLLSWADFTKRESPPGKLPFWTWLDKILELVHDHLKDLWNDGRIMGFVSRSQERRLLKKTMSGTFLLRFSESSEGGITCSWVEHQDDDKVLIYSVQPYTKEVLQSLPLTEIIRHYQLLTEENIPENPLRFLYPRIPRDEAFGCYYQEKVNLQERRKYLKHRLIVVSNRQVDELQQPLELKPEPELESLELELGLVPEPELSLDLEPLLKAGLDLGPELESVLESTLEPVIEPTLCMVSQTVPEPDQGPVSQPVPEPDLPCDLRHLNTEPMEIFRNCVKIEEIMPNGDPLLAGQNTVDEVYVSRPSHFYTDGPLMPSDF

SEQ ID NO: 470 - protein, 335 aa, Homo sapiens
MGKVKVGVNGFGRIGRLVTRAAFNSGKVDIVAINDPFIDLNYMVYMFQYDSTHGKFHGTVKAENGKLVINGNPITIFQERDPSKIKWGDAGAEYVVESTGVFTTMEKAGAHLQGGAKRVIISAPSADAPMFVMGVNHEKYDNSLKIISNASCTTNCLAPLAKVIHDNFGIVEGLMTTVHAITATQKTVDGPSGKLWRDGRGALQNIIPASTGAAKAVGKVIPELNGKLTGMAFRVPTANVSVVDLTCRLEKPAKYDDIKKVVKQASEGPLKGILGYTEHQVVSSDFNSDTHSSTFDAGAGIALNDHFVKLISWYDNEFGYSNRVVDLMAHMASKE

SEQ ID NO: 471 - DNA, 22 bp, Artificial Sequence
  NAP4  Probe
tccgcctcagtcgcctctttcg

SEQ ID NO: 472 - DNA, 19 bp, Artificial Sequence
  NAP4 FOR PRIMER
tcggaagggctccttcaaa

SEQ ID NO: 473 - DNA, 19 bp, Artificial Sequence
  NAP4 REV PRIMER
caccgttgcagctcttggt

SEQ ID NO: 474 - DNA, 34 bp, Artificial Sequence
  MRLP45 Probe
ctcccattcccctcatgctataaaaagaactacc

SEQ ID NO: 475 - DNA, 20 bp, Artificial Sequence
  MRLP45 FOR PRIMER
ggctgctggaagctttgaag

SEQ ID NO: 476 - DNA, 21 bp, Artificial Sequence
  MRLP45 REV PRIMER
tgagcaggatgggagagaaca

SEQ ID NO: 477 - DNA, 22 bp, Artificial Sequence
  TCF2 Probe
caaaagctggccatggacgcct

SEQ ID NO: 478 - DNA, 20 bp, Artificial Sequence
  TCF2 FOR PRIMER
gcaggaaggaggaggcattc

SEQ ID NO: 479 - DNA, 21 bp, Artificial Sequence
  TCF2 REV PRIMER
caggctgtgagtctggttgga

SEQ ID NO: 480 - DNA, 25 bp, Artificial Sequence
  ROK1 Probe
cagctggcttccattttcctggcct

SEQ ID NO: 481 - DNA, 21 bp, Artificial Sequence
  ROK1 FOR PRIMER
tggcaaaactgggttcagaga

SEQ ID NO: 482 - DNA, 19 bp, Artificial Sequence
  ROK1 REV PRIMER
tcggaccttgtgggatgtg

SEQ ID NO: 483 - DNA, 26 bp, Artificial Sequence
  KRT1 Probe
ccgccgcctaatatgcaacattaggg

SEQ ID NO: 484 - DNA, 23 bp, Artificial Sequence
  KRT1 FOR PRIMER
cgagtattccaaagctggtatcg

SEQ ID NO: 485 - DNA, 24 bp, Artificial Sequence
  KRT1 REV PRIMER
atcacagagagatggcccttatct

SEQ ID NO: 486 - DNA, 26 bp, Artificial Sequence
  KRT5 Probe
ccgccgcctaatatgcaacattaggg

SEQ ID NO: 487 - DNA, 23 bp, Artificial Sequence
  KRT5 FOR PRIMER
cgagtattccaaagctggtatcg

SEQ ID NO: 488 - DNA, 24 bp, Artificial Sequence
  KRT5 REV PRIMER
atcacagagagatggcccttatct

SEQ ID NO: 489 - DNA, 26 bp, Artificial Sequence
  KRT8 Probe
ccgccgcctaatatgcaacattaggg

SEQ ID NO: 490 - DNA, 23 bp, Artificial Sequence
  KRT8 FOR PRIMER
cgagtattccaaagctggtatcg

SEQ ID NO: 491 - DNA, 24 bp, Artificial Sequence
  KRT8 REV PRIMER
atcacagagagatggcccttatct

SEQ ID NO: 492 - DNA, 26 bp, Artificial Sequence
  KRT9 Probe
ccgccgcctaatatgcaacattaggg

SEQ ID NO: 493 - DNA, 23 bp, Artificial Sequence
  KRT9 FOR PRIMER
cgagtattccaaagctggtatcg

SEQ ID NO: 494 - DNA, 24 bp, Artificial Sequence
  KRT9 REV PRIMER
atcacagagagatggcccttatct

SEQ ID NO: 495 - DNA, 26 bp, Artificial Sequence
  KRT10-2 Probe
ccgccgcctaatatgcaacattaggg

SEQ ID NO: 496 - DNA, 23 bp, Artificial Sequence
  KRT10-2 FOR PRIMER
cgagtattccaaagctggtatcg

SEQ ID NO: 497 - DNA, 24 bp, Artificial Sequence
  KRT10-2 REV PRIMER
atcacagagagatggcccttatct

SEQ ID NO: 498 - DNA, 26 bp, Artificial Sequence
  KRT14 Probe
ccgccgcctaatatgcaacattaggg

SEQ ID NO: 499 - DNA, 23 bp, Artificial Sequence
  KRT14 FOR PRIMER
cgagtattccaaagctggtatcg

SEQ ID NO: 500 - DNA, 24 bp, Artificial Sequence
  KRT14 REV PRIMER
atcacagagagatggcccttatct

SEQ ID NO: 501 - DNA, 26 bp, Artificial Sequence
  KRT18 Probe
ccgccgcctaatatgcaacattaggg

SEQ ID NO: 502 - DNA, 23 bp, Artificial Sequence
  KRT18 FOR PRIMER
cgagtattccaaagctggtatcg

SEQ ID NO: 503 - DNA, 24 bp, Artificial Sequence
  KRT18 REV PRIMER
atcacagagagatggcccttatct

SEQ ID NO: 504 - DNA, 26 bp, Artificial Sequence
  KRT19 Probe
ccgccgcctaatatgcaacattaggg

SEQ ID NO: 505 - DNA, 23 bp, Artificial Sequence
  KRT19 FOR PRIMER
cgagtattccaaagctggtatcg

SEQ ID NO: 506 - DNA, 24 bp, Artificial Sequence
  KRT19 REV PRIMER
atcacagagagatggcccttatct

SEQ ID NO: 507 - DNA, 26 bp, Artificial Sequence
  KRT6a/b Probe
ccgccgcctaatatgcaacattaggg

SEQ ID NO: 508 - DNA, 23 bp, Artificial Sequence
  KRT6a/b FOR PRIMER
cgagtattccaaagctggtatcg

SEQ ID NO: 509 - DNA, 24 bp, Artificial Sequence
  KRT6a/b REV PRIMER
atcacagagagatggcccttatct

SEQ ID NO: 510 - DNA, 35 bp, Artificial Sequence
  KRT20 Probe
tggcgggaatcctatttatcagactctgtaattga

SEQ ID NO: 511 - DNA, 24 bp, Artificial Sequence
  KRT20 FOR PRIMER
gcaagaaatcagccataagaaagc

SEQ ID NO: 512 - DNA, 24 bp, Artificial Sequence
  KRT20 REV PRIMER
ttgcagctcctctgagtaaaacat
